(19) United States
(12) Patent Application Publication
(10) Pub. No.: US 2006/0216292 A1
(43) Pub. Date: Sep. 28, 2006

(54) Treatment of neurodegenerative diseases

(75) Inventor: Carsten Hopf, Mannheim (DE)

Correspondence Address: CONNOLLY BOVE LODGE & HUTZ, LLP, P O BOX 2207, WILMINGTON, DE, 19899, US

(73) Assignee: CellZome AG, Heidelberg (DE)

(21) Appl. No.: 10/570,909

(22) PCT Filed: Sep. 2, 2004
(86) PCT No.: PCT/EP04/09771

§ 371 Date: Mar. 29, 2006

(30) Foreign Application Priority Data
Sep. 5, 2003 (EP) 03019642.2
Jan. 29, 2004 (EP) 04001895.4
Jan. 29, 2004 (EP) 04001894.7
Mar. 26, 2004 (EP) 04007447.8
Aug. 9, 2004 (EP) 04018874.0

(51) Int. Cl. A61K 48/00; A61K 38/54; A61K 39/395

(52) U.S. Cl. 424/145.1; 514/12; 514/44

(57) ABSTRACT

The present invention relates to the uses of FADS2 interacting molecules, especially FADS2 inhibitors, for the preparation of a medicament for the treatment of neurodegenerative diseases, specially Alzheimer's disease.

[0001] The present invention relates to protein complexes of the APP-processing pathway comprising the FADS2 protein as well as to the use of inhibitors of these complexes as well as of FADS2 in the treatment of neurogenerative diseases.

[0002] Alzheimer's disease is a chronic condition that affects millions of individuals worldwide.

[0003] The brains of sufferers of Alzheimer's disease show a characteristic pathology of prominent neuropathologic lesions, such as the initially intracellular neurofibrillary tangles (NFTs), and the extracellular amyloid-rich senile plaques. These lesions are associated with massive loss of populations of CNS neurons and their progression accompanies the clinical dementia associated with AD. The major component of amyloid plaques is the amyloid beta (A-beta) peptides of various lengths. A variant thereof, which is the Aβ1-42-peptide is the major causative agent for amyloid formation. Amyloid beta is the proteolytic product of a precursor protein, beta amyloid precursor protein (beta-APP or APP). APP is a type-I trans-membrane protein which is sequentially cleaved by several different membrane-associated proteases. The first cleavage of APP occurs by one of two proteases, alpha-secretase or beta-secretase. Alpha secretase is a metalloprotease whose activity is most likely to be provided by one or a combination of the proteins ADAM10 and ADAM17. Cleavage by alpha-secretase precludes formation of amyloid peptides and is thus referred to as non-amyloidogenic. In contrast, cleavage of APP by beta-secretase is a prerequisite for subsequent formation of amyloid peptides. This secretase, also called BACE1 (beta-site APP-cleaving enzyme), is a type-I transmembrane protein containing an aspartyl protease activity (described in detail below).

[0004] The beta-secretase (BACE) activity cleaves APP in the ectodomain, resulting in shedding of secreted, soluble APPb, and in a 99-residue C-terminal transmembrane fragment (APP-C99). Vassar et al. (Science 286, 735-741) cloned a transmembrane aspartic protease that had the characteristics of the postulated beta-secretase of APP, which they termed BACE1. Brain and primary cortical cultures from BACE1 knockout mice showed no detectable beta-secretase activity, and primary cortical cultures from BACE knockout mice produced much less amyloid-beta from APP. This suggests that BACE1, rather than its paralogue BACE2, is the main beta-secretase for APP. BACE1 is a protein of 501 amino acids containing a 21-aa signal peptide followed by a proprotein domain spanning aa 22 to 45. There are alternatively spliced forms, BACE-1-457 and BACE-1-476. The lumenal domain of the mature protein is followed by one predicted transmembrane domain and a short cytosolic C-terminal tail of 24 aa. BACE1 is predicted to be a type 1 transmembrane protein with the active site on the lumenal side of the membrane, where beta-secretase cleaves APP and possible other yet unidentified substrates. Although BACE1 is clearly a key enzyme required for the processing of APP into A-beta, recent evidence suggests additional potential substrates and functions of BACE1 (J. Biol. Chem. 279, 10542-10550). To date, no BACE1 interacting proteins with regulatory or modulatory functions have been described.

[0005] The APP fragment generated by BACE1 cleavage, APP-C99, is a substrate for the gamma-secretase activity, which cleaves APP-C99 within the plane of the membrane into an A-beta peptide (such as the amyloidogenic Aβ1-42 peptide), and into a C-terminal fragment termed APP intracellular domain (AICD) (Annu Rev Cell Dev Biol 19, 25-51). The gamma-secretase activity resides within a multiprotein complex with at least four distinct subunits. The first subunit to be discovered was presenilin (Proc Natl Acad Sci USA 94, 8208-13). Other known protein components of the gamma-secretase complex are Pen-2, Nicastrin and Aph-1a

[0006] Despite recent progress in delineating molecular events underlying the etiology of Alzheimer's disease, no disease-modifying therapies have been developed so far. To this end, the industry has struggled to identify suitable lead compounds for inhibition of BACE1. Moreover, it has been recognized that a growing number of alternative substrates of gamma-secretase exist, most notably the Notch protein. Consequently, inhibition of gamma-secretase is likely to cause mechanism-based side effects. Current top drugs (e.g. Aricept®/donepezil) attempt to achieve a temporary improvement of cognitive functions by inhibiting acetylcholinesterase, which results in increased levels of the neurotransmitter acetylcholine in the brain. These therapies are not suitable for later stages of the disease, they do not treat the underlying disease pathology, and they do not halt disease progression.

[0007] Thus, there is an unmet need for the identification of novel targets allowing novel molecular strategies for the treatment of Alzheimer's disease. In addition, there is a strong need for novel therapeutic compounds modifying the aformentioned molecular processes by targeting said novel targets.

[0008] In a first aspect, the invention provides the use of a FADS2 interacting molecule for the preparation of a pharmaceutical composition for the treatment of neurogenerative diseases.

[0009] In the context of the present invention, it has been surprisingly found that FADS2 forms part of different intracellular protein complexes which are involved in the abberrant processing of APP in Alzheimer's disease by gamma secretase. Especially, it has been found that FADS2 is part of the Nicastrin complex, of the BACE1-complex, of the Psen2-complex and of the PTK7 complex, all molecules known to interact with gamma secretase. These complexes are named after their key protein compound. Other members of these complexes are listed in table 1. However, within the meaning of the present invention it is to be understood that the definition of each of the complexes includes a complex of FADS2 and of one or more othe proteins as listed in table 1, provided that these proteins belong to the same complex as indicated in table 1.

[0010] The identification of FADS2 as a key molecule in these complexes enables the use of FADS2 interacting molecules for the treatment of neurodegenerative diseases. This is especially shown in the Example-section (infra) where it is demonstrated that siRNA directed against FADS2 results in the correct processing of APP, i.e. in the formation of Abeta-40 instead of Abeta-42 by gamma secretase.

[0011] In the context of the present invention, a “FADS2 interacting molecule” is a molecule which binds at least temporarily to PADS2 and which preferably modulates FADS2 activity.

[0012] Fatty acid Δ6 desaturase (FADS2) has been known to catalyze the rate-limiting step in the biosynthesis of polyunsaturated fatty acids (PUFA), the conversion of either linoleic acid (C18:2) into Δ-linolenic acid (gLA; C18:3n-6) in the n-6 metabolic pathway or of Δ-linolenic acid (aLA); C18:3n-3) into stearidonic acid (C18:4n-3) in the n-3 metabolic pathway. gLA is subsequently elongated and converted to arachidonic acid (AA; C20:4n-6) by fatty acid Δ5 desaturase (FADS1). AA is the essential precursor of various eicosanoids, such as prostaglandins and leukotrienes. In the n-3 metabolic pathway, FADS1 generates eicosapentaenoic acid (EPA; C20:5n-3), a PUFA that has been suggested to have neuroprotective effects (Lynch et al., 2003) and to be beneficial in the treatment of schizophrenia and depression (Emsley et al., 2003).

[0013] Another elongation step converts EPA into docosapentaenoic acid (DPA; C22:5n-3) and further to C24:5n-3. This PUFA and the analogous n-6 fatty acid, C24:4n-6. are additional substrates of FADS2, which converts them into C24:6n-3 and C24:5n-6, respectively. Both C24 PUFAs are partially oxidized in peroxisomes to give rise to docosahexaenoic acid (DHA; C22:6n-3), a major brain PUFA, and C22:5n-6, respectively.

[0014] Three human FADS family members have been cloned (see also for rodents (Cho et al (1999), J Biol Chem 274, 37335-37339; Marquardt, A (2000) Genomics 66, 175). All are fusion products composed of an N-terminal cytochrome b5-like domain and a C-terminal multiple membrane-spanning desaturase portion, both characterized by conserved His-motifs. FADS genes are clustered at 11q12-q13.1; likely arisen from gene duplication. The funtion of a related gene product, FADS3, is unknown, but given the high level of sequence similarity between FADS2 and FADS3 it has been proposed that PADS3 may constitute an alternative fatty acid Δ6 desaturase.

[0015] According to the present invention, the expression “FADS2” does not only mean the protein as shown in SEQ ID NO:76, but also a functionally active derivative thereof, or a functionally active fragment thereof, or a homologue thereof, or a variant encoded by a nucleic acid that hybridizes to the nucleic acid encoding said protein under low stringency conditions. Preferably, these low stringency conditions include hybridization in a buffer comprising 35% formamide, 5×SSC, 50 mM Tris-HCl (pH 7.5), 5 mM EDTA, 0.02% PVP, 0.02% BSA, 100 ug/ml denatured salmon sperm DNA, and 10% (wt/vol) dextran sulfate for 18-20 hours at 40° C., washing in a buffer consisting of 2×SSC, 25 mM Tris-HCl (pH 7.4), 5 mM EDTA, and 0.1% SDS for 1-5 hours at 55° C., and washing in a buffer consisting of 2×SSC, 25 mM Tris-HCl (pH 7.4) 5 mM EDTA, and 0.1% SDS for 1.5 hours at 60° C.

[0016] The same applies also to all other proteins named in the present invention. Therefore, a name of given protein or nucleic acid does not only refer to the protein or nucleic acid as depicted in the sequence listing, but also to its functionally active derivative, or to a functionally active fragment thereof, or a homologue thereof, or a variant encoded by a nucleic acid that hybridizes to the nucleic acid encoding said protein under low stringency conditions, preferably under the conditions as mentioned above.

[0017] A functionally active derivative means a derivate which exerts essentially the same activity as FADS2, i.e. the conversion of either linoleic acid (C18:2) into Δ-linolenic acid (gLA; C18:3n-6) in the n-6 metabolic pathway or of Δ-linolenic acid (aLA); C18:3n-3) into stearidonic acid (C18:4n-3) in the n-3 metabolic pathway. The activity of FADS2 as well as of a functionally active derivative thereof can be measured as described in Obukowicz M G et at, The Journal of Pharmacology and Experimental Therapeutics (JPET) 287:157-166 (1998).

[0018] According to the present invention, the term “activity” as used herein, refers to the function of a molecule in its broadest sense. It generally includes, but is not limited to, biological, biochemical, physical or chemical functions of the molecule. It includes for example the enzymatic activity, the ability to interact with other molecules and ability to activate, facilitate, stabilize, inhibit, suppress or destabilize the function of other molecules, stability, ability to localize to certain subcellular locations. Where applicable, said term also relates to the function of a protein complex in its broadest sense.

[0019] According to the present invention, the terms “derivatives” or “analogs of component proteins” or “variants” as used herein preferably include, but are not limited, to molecules comprising regions that are substantially homologous to the component proteins, in various embodiments, by at least 30%, 40%, 50%, 60%, 70%, 80%, 90%, 95% or 99% identity over an amino acid sequence of identical size or when compared to an aligned sequence in which the alignment is done by a computer homology program known in the art, or whose encoding nucleic acid is capable of hybridizing to a sequence encoding the component protein under stringent, moderately stringent, or nonstringent conditions. It means a protein which is the outcome of a modification of the naturally occurring protein, by amino acid substitutions, deletions and additios, respectively, which derivatives still exhibit the biological function of the naturally occurring protein although not necessarily to the same degree. The biological function of such proteins can e.g. be examined by suitable available in vitro assays as provided in the invention.

[0020] The term “functionally active” as used herein refers to a polypeptide, namely a fragment or derivative, having structural, regulatory, or biochemical functions of the protein according to the embodiment of which this polypeptide, namely fragment or derivative is related to.

[0021] The term “fragment” as used herein refers to a polypeptide of at least 10, 20, 30, 40 or 50 amino acids of the component protein according to the embodiment. In specific embodiments, such fragments are not larger than 35, 100 or 200 amino acids.

[0022] The term “gene” as used herein refers to a nucleic acid comprising an open reading frame encoding a polypeptide of, if not stated otherwise, the present invention, including both exon and optionally intron sequences.

[0023] The terms “homologue” or “homologous gene products” as used herein mean a protein in another species, preferably mammals, which performs the same biological function as the a protein component of the complex further described herein. Such homologues are also termed “orthologous gene products”. The algorithm for the detection of orthologue gene pairs from humans and mammalians or other species uses the whole genome of these organisms. First, pairwise best hits are retrieved, using a full Smith-Waterman alignment of predicted proteins. To further improve reliability, these pairs are clustered with pairwise best hits involving Drosophila melanogaster and C. elegans proteins. Such analysis is given, e.g., in Nature, 2001, 409:860-921. The homologues of the proteins according to the invention can either be isolated based on the sequence homology of the genes encoding the proteins provided herein to the genes of other species by cloning the respective gene applying conventional technology and expressing the protein from such gene, or by isolating proteins of the other species by isolating the analogous complex according to the methods provided herein or to other suitable methods commonly known in the art.

[0024] According to the functional assays provided herein, Δ5 desaturase (FADS1) does not have an effect on the metabolization of APP. Thus FADS1 (SEQ ID 122) and the orthologs thereeof are excluded from the scope of the invention. Those sequences are thus excluded from the general definition of FADS2 homologs provided herein.

[0025] In contrast, FADS3 (SEQ ID 125) is explicitely included within the scope of the invention as a screening tool for compounds for the treatment of Alzheimer's disease and/or the modulation of gamma-secretase-activity

[0026] In a preferred embodiment of the present invention, the FADS2-interacting molecule is a FADS2 inhibitor.

[0027] According to the present invention the term “inhibitor” refers to a biochemical or chemical compound which preferably inhibits or reduces the activity of FADS2. This can e.g. occur via suppression of the expression of the corresponding gene. The expression of the gene can be measured by RT-PCR or Western blot analysis. Furthermore, this can occur via inhibition of the activity, e.g. by binding to FADS2.

[0028] Examples of such FADS2 inhibitors are binding proteins or binding peptides directed against FADS2, in particular against the active site of FADS2, and nucleic acids directed against the FADS2 gene

[0029] Prefrably, the inhibitor is selected from the group consisting of antibodies, antisense oligonucleotides, siRNA, low molecular weight molecules (LMWs), binding peptides, aptamers, ribozymes.

[0030] LMWs are molecules which are not proteins, peptides antibodies or nucleic acids, and which exhibit a molecular weight of less than 5000 Da, preferably less than 2000 Da, more preferably less than 2000 Da, most preferably less than 500 Da. Such LMWs may be identified in High-Through-Put procedures starting from libraries. Such methods are known in the art.

[0031] The term “nucleic acids against FADS2” refers to double-stranded or single stranded DNA or RNA which, for example, inhibit the expression of the FADS2 gene or the activity of FADS2 and includes, without limitation, antisense nucleic acids, aptamers, siRNAs (small interfering RNAs) and ribozymes.

[0032] An “antisense” nucleic acid as used herein refers to a nucleic acid capable of hybridizing to a sequence-specific portion of a component protein RNA (preferably mRNA) by virtue of some sequence complementarity. The antisense nucleic acid may be complementary to a coding and/or noncoding region of a component protein mRNA. Such antisense nucleic acids that inhibit complex formation or activity have utility as therapeutics, and can be used in the treatment or prevention of disorders as described herein.

[0033] The nucleic acids, e.g. the antisense nucleic acids or siRNAs, can be synthesized chemically, e.g. in accordance with the phosphotriester method (see, for example, Uhlmann, E. & Peyman, A. (1990) Chemical Reviews, 90, 543-584). Aptamers are nucleic acids which bind with high affinity to a polypeptide, here FADS2. Aptamers can be isolated by selection methods such as SELEX (see e.g. Jayasena (1999) Clin. Chem., 45, 1628-50; Klug and Famulok (1994) M. Mol. Biol. Rep., 20, 97-107; U.S. Pat. No. 5,582,981) from a large pool of different single-stranded RNA molecules. Aptamers can also be synthesized and selected in their mirror-image form, for example as the L-ribonucleotide (Nolte et al. (1996) Nat. Biotechnol., 14, 1116-9; Klussmann et al. (1996) Nat. Biotechnol., 14, 1112-5). Forms which have been isolated in this way enjoy the advantage that they are not degraded by naturally occurring ribonucleases and, therefore, possess greater stability.

[0034] Nucleic acids may be degraded by endonucleases or exonucleases, in particular by DNases and RNases which can be found in the cell. It is, therefore, advantageous to modify the nucleic acids in order to stabilize them against degradation, thereby ensuring that a high concentration of the nucleic acid is maintained in the cell over a long period of time (Beigelman et al. (1995) Nucleic Acids Res. 23:3989-94; WO 95/11910; WO 98/37240; WO 97/29116). Typically, such a stabilization can be obtained by introducing one or more internucleotide phosphorus groups or by introducing one or more non-phosphorus internucleotides.

[0035] Suitable modified internucleotides are compiled in Uhlmann and Peyman (1990), supra (see also Beigelman et al. (1995) Nucleic Acids Res. 23:3989-94; WO 95/11910; WO 98/37240; WO 97/29116). Modified internucleotide phosphate radicals and/or non-phosphorus bridges in a nucleic acid which can be employed in one of the uses according to the invention contain, for example, methyl phosphonate, phosphorothioate, phosphoramidate, phosphorodithioate and/or phosphate esters, whereas non-phosphorus internucleotide analogues contain, for example, siloxane bridges, carbonate bridges, carboxymethyl esters, acetamidate bridges and/or thioether bridges. It is also the intention that this modification should improve the durability of a pharmaceutical composition which can be employed in one of the uses according to the invention.

[0036] The use of suitable antisense nucleic acids is further described e.g. in Zheng and Kemeny (1995) Clin. Exp. Immunol., 100, 380-2; Nellen and Lichtenstein (1993) Trends Biochem. Sci., 18, 419-23, Stein (1992) Leukemia, 6, 697-74 or Yacyshyn, B. R. et al. (1998) Gastroenterology, 114, 1142).

[0037] Regarding antisense molecules, the following specific embodiments apply:

[0038] The present invention provides the therapeutic or prophylactic use of nucleic acids of at least six nucleotides that are antisense to a gene or cDNA encoding a component protein, or a portion thereof.

[0039] The antisense nucleic acids of the invention can be oligonucleotides that are double-stranded or single-stranded, RNA or DNA, or a modification or derivative thereof, which can be directly administered to a cell, or which can be produced intracellularly by transcription of exogenous, introduced sequences.

[0040] In another embodiment, the present invention is directed to a method for inhibiting the expression of component protein nucleic acid sequences, in a prokaryotic or eukaryotic cell, comprising providing the cell with an effective amount of a composition comprising an antisense nucleic acid of the component protein, or a derivative thereof, of the invention.

[0041] The antisense nucleic acids are of at least six nucleotides and are preferably oligonucleotides, ranging from 6 to about 200 nucleotides. In specific aspects, the oligonucleotide is at least 10 nucleotides, at least 15 nucleotides, at least 100 nucleotides, or at least 200 nucleotides. The oligonucleotides can be DNA or RNA or chimeric mixtures, or derivatives or modified versions thereof, and either single-stranded or double-stranded. The oligonucleotide can be modified at the base moiety, sugar moiety, or phosphate backbone. The oligonucleotide may include other appending groups such as peptides, agents facilitating transport across the cell membrane (see, e.g., Letsinger et al., 1989, Proc. Natl. Acad. Sci. USA 86:6553-6556; Lemaitre et al., 1987, Proc. Natl. Acad. Sci. USA 84:648-652; International Patent Publication No. WO 88/09810) or blood-brain barrier (see, e.g., International Patent Publication No. WO 89/10134), hybridization-triggered cleavage agents (see, e.g., Krol et al., 1988, BioTechniques 6:958-976), or intercalating agents (see, e.g., Zon, 1988, Pharm. Res. 5:539-549).

[0042] In a preferred aspect of the invention, an antisense oligonucleotide is provided, preferably as single-stranded DNA. The oligonucleotide may be modified at any position in its structure with constituents generally known in the art.

[0043] The antisense oligonucleotides may comprise at least one modified base moiety which is selected from the group including but not limited to 5-fluorouracil, 5-bromouracil, 5-chlorouracil, 5-iodouracil, hypoxanthine, xanthine, 4-acetylcytosine, 5-(carboxyhydroxylmethyl)uracil, 5-carboxymethylaminomethyl-2-thio-uridine, 5-carboxymethylaminomethyluracil, dihydrouracil, D-galactosylqueosine, inosine, N6-isopentenyladenine, 1-methylguanine, 1-methylinosine, 2,2-dimethylguanine, 2-methyladenine, 2-methylguanine, 3-methylcytosine, 5-methylcytosine, N6-adenine, 7-methylguanine, 5-methylaminomethyluracil, 5-methoxyaminomethyl-2-thiouracil, D-mannosylqueosine, 5N-methoxycarboxymethyluracil, 5-methoxyuracil, 2-methyl-thio-N-6-isopentenyladenine, uracil-5-oxyacetic acid (v), wybutoxosine, pseudouracil, queosine, 2-thiocytosine, 5-methyl-2-thiouracil, 2-thiouracil, 4-thiouracil, 5-methyluracil, uracil-5-oxyacetic acid methylester, uracil-5-oxyacetic acid (v), 5-methyl-2-thiouracil, 3-(3-amino-3-N-2-carboxypropyl)uracil, (acp3)w, and 2,6-diaminopurine.

[0044] In another embodiment, the oligonucleotide comprises at least one modified sugar moiety selected from the group including, but not limited to, arabinose, 2-fluoroarabinose, xylulose, and hexose.

[0045] In yet another embodiment, the oligonucleotide comprises at least one modified phosphate backbone selected from the group consisting of a phosphorothioate, a phosphorodithioate, a phosphoramidothioate, a phosphoramidate, a phosphordiamidate, a methylphosphonate, an alkyl phosphotriester, and a formacetal, or an analog of the foregoing.

[0046] In yet another embodiment, the oligonucleotide is a 2-a-anomeric oligonucleotide. An a-anomeric oligonucleotide forms specific double-stranded hybrids with complementary RNA in which, contrary to the usual β-units, the strands run parallel to each other (Gautier et al., 1987, Nucl. Acids Res. 15:6625-6641).

[0047] The oligonucleotide may be conjugated to another molecule, e.g., a peptide, hybridization-triggered cross-linking agent, transport agent, hybridization-triggered cleavage agent, etc.

[0048] Throughout the invention, oligonucleotides of the invention may be synthesized by standard methods known in the art, e.g., by use of an automated DNA synthesizer (such as are commercially avail-able from Biosearch, Applied Biosystems, etc.). As examples, phosphorothioate oligo-nucleotides may be synthesized by the method of Stein et al. (1988, Nucl. Acids Res. 16:3209), methylphosphonate oligonucleotides can be prepared by use of controlled pore glass polymer supports (Sarin et al., 1988, Proc. Natl. Acad. Sci. USA 85:7448-7451), etc.

[0049] In a specific embodiment, the antisense oligonucleotides comprise catalytic RNAs, or ribozymes (see, e.g., International Patent Publication No. WO 90/11364; Sarver et al., 1990, Science 247:1222-1225). In another embodiment, the oligonucleotide is a 2′-0-methylribonucleotide (Inoue et al., 1987, Nucl. Acids Res. 15:6131-6148), or a chimeric RNA-DNA analog (Inoue et al., 1987, FEBS Lett. 215:327-330).

[0050] In an alternative embodiment, the antisense nucleic acids of the invention are produced intracellularly by transcription from an exogenous sequence. For example, a vector can be introduced in vivo such that it is taken up by a cell, within which cell the vector or a portion thereof is transcribed, producing an antisense nucleic acid (RNA) of the invention. Such a vector would contain a sequence encoding the component protein. Such a vector can remain episomal or become chromosomally integrated, as long as it can be transcribed to produce the desired antisense RNA. Such vectors can be constructed by recombinant DNA technology methods standard in the art. Vectors can be plasmid, viral, or others known in the art to be capable of replication and expression in mammalian cells. Expression of the sequences encoding the antisense RNAs can be by any promoter known in the art to act in mammalian, preferably human, cells. Such promoters can be inducible or constitutive. Such promoters include, but are not limited to, the SV40 early promoter region (Bernoist and Chambon, 1981, Nature 290:304-310), the promoter contained in the 3′ long terminal repeat of Rous sarcoma virus (Yamamoto et al., 1980, Cell 22:787-797), the herpes thymidine kinase promoter (Wagner et al., 1981, Proc. Natl. Acad. Sci. USA 78:1441-1445), the regulatory sequences of the metallothionein gene (Brinster et al., 1982, Nature 296:39-42), etc.

[0051] The antisense nucleic acids of the invention comprise a sequence complementary to at least a portion of an RNA transcript of a component protein gene, preferably a human gene. However, absolute complementarity, although preferred, is not required. A sequence “complementary to at least a portion of an RNA,” as referred to herein, means a sequence having sufficient complementarity to be able to hybridize with the RNA, forming a stable duplex; in the case of double-stranded antisense nucleic acids, a single strand of the duplex DNA may thus be tested, or triplex formation may be assayed. The ability to hybridize will depend on both the degree of complementarity and the length of the antisense nucleic acid. Generally, the longer the hybridizing nucleic acid, the more base mismatches with a component protein RNA it may contain and still form a stable duplex (or triplex, as the case may be). One skilled in the art can ascertain a tolerable degree of mismatch by use of standard procedures to determine the melting point of the hybridized complex.

[0052] Pharmaceutical compositions of the invention (see Section “Pharmaceutical compositions and therapeutic/prophylactic administration”, infra), comprising an effective amount of a protein component antisense nucleic acid in a pharmaceutically acceptable carrier can be administered to a patient having a disease or disorder that is of a type that expresses or overexpresses a protein complex of the present invention.

[0053] The amount of antisense nucleic acid that will be effective in the treatment of a particular disorder or condition will depend on the nature of the disorder or condition, and can be determined by standard clinical techniques. Where possible, it is desirable to determine the antisense cytotoxicity in vitro, and then in useful animal model systems, prior to testing and use in humans.

[0054] In a specific embodiment, pharmaceutical compositions comprising antisense nucleic acids are administered via liposomes, microparticles, or microcapsules. In various embodiments of the invention, it may be useful to use such compositions to achieve sustained release of the antisense nucleic acids. In a specific embodiment, it may be desirable to utilize liposomes targeted via antibodies to specific identifiable central nervous system cell types (Leonetti et al., 1990, Proc. Natl. Acad. Sci. U.S.A. 87:2448-2451; Renneisen et al., 1990, J. Biol. Chem. 265:16337-16342).

[0055] The production and use of siRNAs as tools for RNA interference in the process to down regulate or to switch off gene expression, here FADS2 gene expression, is e.g. described in Elbashir, S. M. et al. (2001) Genes Dev., 15, 188 or Elbashir, S. M. et al. (2001) Nature, 411, 494. Preferably, siRNAs exhibit a length of less than 30 nucleotides, wherein the identity stretch of the sense strang of the siRNA is preferably at least 19 nucleotides.

[0056] Ribozymes are also suitable tools to inhibit the translation of nucleic acids, here the FADS2 gene, because they are able to specifically bind and cut the mRNAs. They are e.g. described in Amarzguioui et al. (1998) Cell. Mol. Life Sci., 54, 1175-202; Vaish et al. (1998) Nucleic Acids Res., 26, 5237-42; Persidis (1997) Nat. Biotechnol., 15, 921-2 or Couture and Stinchcomb (1996) Trends Genet., 12, 510-5.

[0057] The term “binding protein” or “binding peptide” refers to a class of proteins or peptides which bind and inhibit FADS2, without limitation, polyclonal or monoclonal antibodies, antibody fragments and protein scaffolds directed against these proteins.

[0058] According to the present invention the term antibody or antibody fragment is also understood as meaning antibodies or antigen-binding parts thereof, which have been prepared recombinantly and, where appropriate, modified, such as chimaeric antibodies, humanized antibodies, multifunctional antibodies, bispecific or oligospecific antibodies, single-stranded antibodies and F(ab) or F(ab)₂ fragments (see, for example, EP-B1-0 368 684, U.S. Pat. No. 4,816,567, U.S. Pat. No. 4,816,397, WO 88/01649, WO 93/06213 or WO 98/24884), preferably produced with the help of a FAB expression library.

[0059] As an alternative to the classical antibodies it is also possible, for example, to use protein scaffolds against PADS2, e.g. anticalins which are based on lipocalin (Beste et al. (1999) Proc. Natl. Acad. Sci. USA, 96, 1898-1903). The natural ligand-binding sites of the lipocalins, for example the retinol-binding protein or the bilin-binding protein, can be altered, for example by means of a “combinatorial protein design” approach, in such a way that they bind to selected haptens, here to FADS2 (Skerra, 2000, Biochim. Biophys. Acta, 1482, 337-50). Other known protein scaffolds are known as being alternatives to antibodies for molecular recognition (Skerra (2000) J. Mol. Recognit., 13, 167-187).

[0060] The procedure for preparing an antibody or antibody fragment is effected in accordance with methods which are well known to the skilled person, e.g. by immunizing a mammal, for example a rabbit, with FADS2, where appropriate in the presence of, for example, Freund's adjuvant and/or aluminium hydroxide gels (see, for example, Diamond, B. A. et al. (1981) The New England Journal of Medicine: 1344-1349). The polyclonal antibodies which are formed in the animal as a result of an immunological reaction can subsequently be isolated from the blood using well known methods and, for example, purified by means of column chromatography. Monoclonal antibodies can, for example, be prepared in accordance with the known method of Winter & Milstein (Winter, G. & Milstein, C. (1991) Nature, 349, 293-299).

[0061] In detail, polyclonal antibodies can be prepared as described above by immunizing a suitable subject with a polypeptide as an immunogen. Preferred polyclonal antibody compositions are ones that have been selected for antibodies directed against a polypeptide or polypeptides of the invention. Particularly preferred polyclonal antibody preparations are ones that contain only antibodies directed against a given polypeptide or polypeptides. Particularly preferred immunogen compositions are those that contain no other human proteins such as, for example, immunogen compositions made using a non-human host cell for recombinant expression of a polypeptide of the invention. In such a manner, the only human epitope or epitopes recognized by the resulting antibody compositions raised against this immunogen will be present as part of a polypeptide or polypeptides of the invention.

[0062] The antibody titer in the immunized subject can be monitored over time by standard techniques, such as with an enzyme linked immunosorbent assay (ELISA) using immobilized polypeptide. If desired, the antibody molecules can be isolated from the mammal (e.g., from the blood) and further purified by well-known techniques, such as protein A chromatography to obtain the IgG fraction. Alternatively, antibodies specific for a protein or polypeptide of the invention can be selected for (e.g., partially purified) or purified by, e.g., affinity chromatography. For example, a recombinantly expressed and purified (or partially purified) protein of the invention is produced as described herein, and covalently or non-covalently coupled to a solid support such as, for example, a chromatography column. The column can then be used to affinity purify antibodies specific for the proteins of the invention from a sample containing antibodies directed against a large number of different epitopes, thereby generating a substantially purified antibody composition, i.e., one that is substantially free of contaminating antibodies. By a substantially purified antibody composition is meant, in this context, that the antibody sample contains at most only 30% (by dry weight) of contaminating antibodies directed against epitopes other than those on the desired protein or polypeptide of the invention, and preferably at most 20%, yet more preferably at most 10%, and most preferably at most 5% (by dry weight) of the sample is contaminating antibodies. A purified antibody composition means that at least 99% of the antibodies in the composition are directed against the desired protein or polypeptide of the invention.

[0063] At an appropriate time after immunization, e.g., when the specific antibody titers are highest, antibody-producing cells can be obtained from the subject and used to prepare monoclonal antibodies by standard techniques, such as the hybridoma technique originally described by Kohler and Milstein, 1975, Nature 256:495-497, the human B cell hybridoma technique (Kozbor et al., 1983, Immunol. Today 4:72), the EBV-hybridoma technique (Cole et al., 1985, Monoclonal Antibodies and Cancer Therapy, Alan R. Liss, Inc., pp. 77-96) or trioma techniques. The technology for producing hybridomas is well known (see generally Current Protocols in Immunology 1994, Coligan et al. (eds.) John Wiley & Sons, Inc., New York, N.Y.). Hybridoma cells producing a monoclonal antibody of the invention are detected by screening the hybridoma culture supernatants for antibodies that bind the polypeptide of interest, e.g., using a standard ELISA assay.

[0064] Alternative to preparing monoclonal antibody-secreting hybridomas, a monoclonal antibody directed against a polypeptide of the invention can be identified and isolated by screening a recombinant combinatorial immunoglobulin library (e.g., an antibody phage display library) with the polypeptide of interest. Kits for generating and screening phage display libraries are commercially available (e.g., the Pharmacia Recombinant Phage Antibody System, Catalog No. 27-9400-01; and the Stratagene SurfZAP Phage Display Kit, Catalog No. 240612). Additionally, examples of methods and reagents particularly amenable for use in generating and screening antibody display library can be found in, for example, U.S. Pat. No. 5,223,409; PCT Publication No. WO 92/18619; PCT Publication No. WO 91/17271; PCT Publication No. WO 92/20791; PCT Publication No. WO 92/15679; PCT Publication No. WO 93/01288; PCT Publication No. WO 92/01047; PCT Publication No. WO 92/09690; PCT Publication No. WO 90/02809; Fuchs et al., 1991, Bio/Technology 9:1370-1372; Hay et al., 1992, Hum. Antibod. Hybridomas 3:81-85; Huse et al., 1989, Science 246:1275-1281; Griffiths et al., 1993, EMBO J. 12:725-734.

[0065] Additionally, recombinant antibodies, such as chimeric and humanized monoclonal antibodies, comprising both human and non-human portions, which can be made using standard recombinant DNA techniques, are within the scope of the invention. A chimeric antibody is a molecule in which different portions are derived from different animal species, such as those having a variable region derived from a murine mAb and a human immunoglobulin constant region. (See, e.g., Cabilly et al., U.S. Pat. No. 4,816,567; and Boss et al., U.S. Pat. No. 4,816,397, which are incorporated herein by reference in their entirety.) Humanized antibodies are antibody molecules from non-human species having one or more complementarily determining regions (CDRs) from the non-human species and a framework region from a human immunoglobulin molecule. (See, e.g., Queen, U.S. Pat. No. 5,585,089, which is incorporated herein by reference in its entirety.) Such chimeric and humanized monoclonal antibodies can be produced by recombinant DNA techniques known in the art, for example using methods described in PCT Publication No. WO 87/02671; European Patent Application 184,187; European Patent Application 171,496; European Patent Application 173,494; PCT Publication No. WO 86/01533; U.S. Pat. No. 4,816,567; European Patent Application 125,023; Better et al., 1988, Science 240:1041-1043; Liu et al., 1987, Proc. Natl. Acad. Sci. USA 84:3439-3443; Liu et al., 1987, J. Immunol. 139:3521-3526; Sun et al., 1987, Proc. Natl. Acad. Sci. USA 84:214-218; Nishimura et al., 1987, Canc. Res. 47:999-1005; Wood et al., 1985, Nature 314:446-449; and Shaw et al., 1988, J. Natl. Cancer Inst. 80:1553-1559); Morrison, 1985, Science 229:1202-1207; Oi et al., 1986, Bio/Techniques 4:214; U.S. Pat. No. 5,225,539; Jones et al., 1986, Nature 321:552-525; Verhoeyan et al., 1988, Science 239:1534; and Beidler et al., 1988, J. Immunol. 141:4053-4060.

[0066] Completely human antibodies are particularly desirable for therapeutic treatment of human patients. Such antibodies can be produced, for example, using transgenic mice which are incapable of expressing endogenous immunoglobulin heavy and light chains genes, but which can express human heavy and light chain genes. The transgenic mice are immunized in the normal fashion with a selected antigen, e.g., all or a portion of a polypeptide of the invention. Monoclonal antibodies directed against the antigen can be obtained using conventional hybridoma technology. The human immunoglobulin transgenes harbored by the transgenic mice rearrange during B cell differentiation, and subsequently undergo class switching and somatic mutation. Thus, using such a technique, it is possible to produce therapeutically useful IgG, IgA and IgE antibodies. For an overview of this technology for producing human antibodies, see Lonberg and Huszar, 1995, Int. Rev. Immunol. 13:65-93). For a detailed discussion of this technology for producing human antibodies and human monoclonal antibodies and protocols for producing such antibodies, see, e.g., U.S. Pat. No. 5,625,126; U.S. Pat. No. 5,633,425; U.S. Pat. No. 5,569,825; U.S. Pat. No. 5,661,016; and U.S. Pat. No. 5,545,806. In addition, companies such as Abgenix, Inc. (Freemont, Calif.), can be engaged to provide human antibodies directed against a selected antigen using technology similar to that described above.

[0067] Completely human antibodies which recognize a selected epitope can be generated using a technique referred to as “guided selection.” In this approach a selected non-human monoclonal antibody, e.g., a murine antibody, is used to guide the selection of a completely human antibody recognizing the same epitope. (Jespers et al., 1994, Bio/technology 12:899-903).

[0068] Antibody fragments that contain the idiotypes of the complex can be generated by techniques known in the art. For example, such fragments include, but are not limited to, the F(ab′)2 fragment which can be produced by pepsin digestion of the antibody molecule; the Fab′ fragment that can be generated by reducing the disulfide bridges of the F(ab′)2 fragment; the Fab fragment that can be generated by treating the antibody molecular with papain and a reducing agent; and Fv fragments.

[0069] In the production of antibodies, screening for the desired antibody can be accomplished by techniques known in the art, e.g., ELISA (enzyme-linked immunosorbent assay). To select antibodies specific to a particular domain of the complex, or a derivative thereof, one may assay generated hybridomas for a product that binds to the fragment of the complex, or a derivative thereof, that contains such a domain. For selection of an antibody that specifically binds a complex of the present, or a derivative, or homologue thereof, but which does not specifically bind to the individual proteins of the complex, or a derivative, or homologue thereof, one can select on the basis of positive binding to the complex and a lack of binding to the individual protein components.

[0070] The foregoing antibodies can be used in methods known in the art relating to the localization and/or quantification of the given protein or proteins, e.g., for imaging these proteins, measuring levels thereof in appropriate physiological samples (by immunoassay), in diagnostic methods, etc. This hold true also for a derivative, or homologue thereof of a complex.

[0071] In a preferred embodiment, the FADS2 inhibitor is either a siRNA with the sequences: GCUGAAAUACCUGCCCUAC or GCAUGGCAUUGAAUACCAG or the compound SC-26196 (see Obukowicz, supra).

[0072] As discussed above, PADS2 is part of protein complexes which are involved in the regulation of gamma secretase activity and/or beta-secretase. Therefore, in a preferred embodiment, the FADS2 interacting molecule or inhibitor acts on a FADS2 molecule which is part of a protein complex comprising at least on further protein selected from the proteins in table 1, third column. Preferably, FADS2 is part of one of the compexes that are shown in Table 1, wherein in this context “complex” means that apart from FADS2 at least one of the proteins of one of the complexes is present. These complexes include the three Nicastrin complexes (a), (b) and (c), the BACE1-complex (a) and (b), the Psen2-compex as well as the PTK7 complex.

[0073] Said protein complexes have been identified as assemblies of proteins interacting with the gamma-secretase components Nicastrin and Psen-2 and with beta-secretase protein BACE1 as well as with PTK7, itself a member of the BACE1 complex.

[0074] Presenilins 1 and 2 (Psen1 and Psen2, also referred to as PS1 and PS2 respectively) are integral membrane proteins which are localised in the endoplasmic reticulum, the Golgi and also at the cell surface (Kovacs, Nat Med 2. 224). They are predominantly found as a heterodimers of the NTF and CTF endoproteolytic fragments. The protease that cleaves presenilins (the “presenilinase”) is not known, it is likely that the process is autocatalytic, also the functional significance of PS (auto)proteolysis is unclear. Presenilins are involved in the proteolytical processing of Amyloid precursor protein (APP) (De Strooper et al, Nature 391, 387) and the Notch receptor (De Strooper et al, Nature 398, 518). In addition, Presenilins are associated with the cell-adhesion proteins alpha and beta-catenin, N-cadherin, and E-cadherin (Georgakopoulos et al, Mol Cell 4, 893) and other members of the armadillo family (Yu et al, J Biol Chem 273, 16470). APP processing by Presenilins is through their effects on gamma-secretase which cleaves APP, generating the C-terminus of the A-beta peptide. PS1 associates with the C83 and C99 processed C-terminal fragments of APP (Xia et al, Proc Natl Acad Sci USA, 94, 8208), Nicastrin (Yu et al, Nature 407, 48) and Pen-2 (Francis et al, Dev Cell 3, 85). Aph-1 (Francis et al, Dev Cell 3, 85) is required in Presenilin processing. It is not clear whether Presenilins regulate gamma-secretase activity directly or whether they are protease enzymes themselves (Kopan and Gouate, Genes Dev 14, 2799). The gamma secretase activity could comprise a multimeric complex of these proteins (Yu et al, Nature 407, 48) but it is not known how the relationship between these proteins affects secretase activity.

[0075] Nicastrin is a type 1 trans-membrane glycoprotein with a conserved transmembrane domain and DYIGS motif (Yu et al, Nature 407, 48) which is constitutively expressed in neural cell lines (Satoh and Kuroda, Neuropathology 21, 115). Biochemical studies have shown that Nicastrin binds to Presenilins 1 and 2, C-terminal derivatives of APP (Yu et al, Nature 407, 48), membrane-tethered forms of Notch (Chen et al, Nat Cell Biol 3, 751) and that it is a member of the gamma-secretase complex along with PS1 and PS2. It has been shown that Nicastrin is required for the intra-membrane cleavage of Notch (Lopez-Schier and St Johnston, Dev Cell 2, 79) and APP (Chung and Struhl, Nat Cell Biol 3, 1129), it may also have a role in post-translational stabilisation of Presenilin (Hu et al, Dev Cell 2, 69).

[0076] Protein Tyrosine Kinase 7 (PTK7), also referred to as colon carcinoma kinase 4 (CCK4), is an immunoglobulin superfamily transmembrane glycoprotein related to chicken KLG and D. melanogaster off-track. The gene has been mapped to human chromosome 6p21.1-->p12.2 by fluorescence in situ hybridization (Banga et al., 1997, Cytogenet Cell Genet. 1997; 76(1-2):43-4). PTX7, several splicing variants of which exist in human tissues, differs from the receptor tyrosine kinase consensus sequence in several positions, suggesting that the protein be catalytically inactive (Mossie et al., 1995, Oncogene. 1995 Nov. 16; 11(10):2179-84.). PTK7 is expressed in multiple human tissues, but its function is unknown. However, its similarity to the D. melanogaster transmembrane protein Off-track/Dtrk, which serves as a coreceptor of plexin A for semaphorins Sema 1A (Winberg et al., Neuron. 2001 Oct. 11; 32(1):53-62) and Sema 6D (Toyofuku et al., Genes Dev. 2004 Feb. 15; 18(4):435-47.), suggests that PTK7 might act as a coreceptor of a plexin-like protein. In the CNS, PTK7 might therefore play a role in maintenance of neuronal connectivity.

[0077] The beta-secretase (BACE) activity cleaves APP in the ectodomain, resulting in shedding of secreted, soluble APPb, and in a 99-residue C-terminal transmembrane fragment (APP-C99). Vassar et al. (Science 286, 735-741) cloned a transmembrane aspartic protease that had the characteristics of the postulated beta-secretase of APP, which they termed BACE1. Brain and primary cortical cultures from BACE1 knockout mice showed no detectable beta-secretase activity, and primary cortical cultures from BACE knockout mice produced much less amyloid-beta from APP. This suggests that BACE1, rather than its paralogue BACE2, is the main beta-secretase for APP. BACE1 is a protein of 501 amino acids containing a 21-aa signal peptide followed by a proprotein domain spanning aa 22 to 45. There are alternatively spliced forms, BACE-1-457 and BACE-1-476. The lumenal domain of the mature protein is followed by one predicted transmembrane domain and a short cytosolic C-terminal tail of 24 aa. BACE1 is predicted to be a type 1 transmembrane protein with the active site on the lumenal side of the membrane, where beta-secretase cleaves APP and possible other yet unidentified substrates. Although BACE1 is clearly a key enzyme required for the processing of APP into A-beta, recent evidence suggests additional potential substrates and functions of BACE1 (J. Biol. Chem. 279, 10542-10550). To date, no BACE1 interacting proteins with regulatory or modulatory functions have been described.

[0078] The elucidation of these protein interactors provides novel intervention points for therapy.

[0079] As explained above, it has been surprisingly found in the context of the present invention that FADS2 is part of the protein compexes regulating beta-secretase and/or gamma secretase activity. Therfore, in a preferred embodiment, the inhibitor or interacting molecule modulates the activity of beta-secretase and/or gamma secretase.

[0080] In the context of the present invention, “modulating the activity of gamma secretase and/or beta secretase” means that the activity is reduced in that less or no product is formed (partial or complete inhibition) or that the respective enzyme produces a different product (in the case of gamma secretase e.g. Abeta-40 instead of Abeta-42) or that the relative quantities of the products are different (in the case of gamma secretase e.g. more Abeta-40 than Abeta-42). Furthermore, it is included that the modulator modulates either gamma secretase or beta secretase or the activity of both enzymes.

[0081] Throughout the invention, it is preferred that the beta secretase modulator inhibits the activity of beta secretase either completely or partially.

[0082] With respect to the modulator of gamma secretase activity, it is preferred that this modulator inhibits gamma secretase activity. However, it is also preferred that the activity of gamma secretase is shifted in a way that more Abeta-40 is produced instead of Abeta-42.

[0083] Gamma secretase activity can e.g. measured by determining APP processing, e.g. by determining whether Abeta-40 or Abeta-42 is produced (see Example-section, infra).

[0084] To measure BACE1 activity, changes of the ratio between alpha- and beta-C-terminal APP fragments can be analyzed by Western Blotting (Blasko et al., J Neural Transm 111, 523); additional examples for BACE1 activity assays include but are not limited to: use of a cyclized enzyme donor peptide containing a BACE1 cleavage site to reconstitute and measure beta-galactosidase reporter activity (Naqvi et al., J Biomol Screen. 9, 398); use of quenched fluorimetric peptide substrates and fluorescence measurements (Andrau et al., J. Biol Chem 278, 25859); use of cell-based assays utilizing recombinant chimeric proteins, in which an enzyme (such as alkaline phosphatase) is linked via a stretch of amino acids, that contain the BACE1 recognition sequence, to a Golgi-resident protein (Oh et al., Anal Biochem, 323, 7); fluorescence resonance energy transfer (FRET)-based assays (Kennedy et al., Anal Biochen 319, 49); a cellular growth selection system in yeast (Luthi et al., Biochim Biophys Acta 1620, 167).

[0085] Preferably, the neurodegenerative disease is Alzheimer's disease.

[0086] According to the invention, the FADS2 interacting molecule is used to prepare a pharmaceutical composition.

[0087] The invention provides pharmaceutical compositions, which may be administered to a subject in an effective amount. In a preferred aspect, the therapeutic is substantially purified. The subject is preferably an animal including, but not limited to animals such as cows, pigs, horses, chickens, cats, dogs, etc., and is preferably a mammal, and most preferably human. In a specific embodiment, a non-human mammal is the subject.

[0088] Various delivery systems are known and can be used to administer a therapeutic of the invention, e.g., encapsulation in liposomes, microparticles, and microcapsules: use of recombinant cells capable of expressing the therapeutic, use of receptor-mediated endocytosis (e.g., Wu and Wu, 1987, J. Biol. Chem. 262:4429-4432); construction of a therapeutic nucleic acid as part of a retroviral or other vector, etc. Methods of introduction include but are not limited to intradermal, intramuscular, intraperitoneal, intravenous, subcutaneous, intranasal, epidural, and oral routes. The compounds may be administered by any convenient route, for example by infusion, by bolus injection, by absorption through epithelial or mucocutaneous linings (e.g., oral, rectal and intestinal mucosa, etc.), and may be administered together with other biologically active agents. Administration can be systemic or local. In addition, it may be desirable to introduce the pharmaceutical compositions of the invention into the central nervous system by any suitable route, including intraventricular and intrathecal injection; intraventricular injection may be facilitated by an intraventricular catheter, for example, attached to a reservoir, such as an Ommaya reservoir. Pulmonary administration can also be employed, e.g., by use of an inhaler or nebulizer, and formulation with an aerosolizing agent.

[0089] In a specific embodiment, it may be desirable to administer the pharmaceutical compositions of the invention locally to the area in need of treatment. This may be achieved by, for example, and not by way of limitation, local infusion during surgery, topical application, e.g., in conjunction with a wound dressing after surgery, by injection, by means of a catheter, by means of a suppository, or by means of an implant, said implant being of a porous, non-porous, or gelatinous material, including membranes, such as sialastic membranes, or fibers. In one embodiment, administration can be by direct injection at the site (or former site) of a malignant tumor or neoplastic or pre-neoplastic tissue.

[0090] In another embodiment, the therapeutic can be delivered in a vesicle, in particular a liposome (Langer, 1990, Science 249:1527-1533; Treat et al., 1989, In: Liposomes in the Therapy of Infectious Disease and Cancer, Lopez-Berestein and Fidler, eds., Liss, New York, pp. 353-365; Lopez-Berestein, ibid., pp. 317-327; see generally ibid.)

[0091] In yet another embodiment, the therapeutic can be delivered via a controlled release system. In one embodiment, a pump may be used (Langer, supra; Sefton, 1987, CRC Crit. Ref. Biomed. Eng. 14:201-240; Buchwald et al., 1980, Surgery 88:507-516; Saudek et al., 1989, N. Engl. J. Med. 321:574-579). In another embodiment, polymeric materials can be used (Medical Applications of Controlled Release, Langer and Wise, eds., CRC Press, Boca Raton, Fla., 1974; Controlled Drug Bioavailability, Drug Product Design and Performance, Smolen and Ball, eds., Wiley, New York, 1984; Ranger and Peppas, 1983, Macromol. Sci. Rev. Macromol. Chem. 23:61; Levy et al., 1985, Science 228:190-192; During et al., 1989, Ann. Neurol. 25:351-356; Howard et al., 1989, J. Neurosurg. 71:858-863). In yet another embodiment, a controlled release system can be placed in proximity of the therapeutic target, i.e., the brain, thus requiring only a fraction of the systemic dose (e.g., Goodson, 1984, In: Medical Applications of Controlled Release, supra, Vol. 2, pp. 115-138). Other controlled release systems are discussed in the review by Langer (1990, Science 249:1527-1533).

[0092] In a specific embodiment where the therapeutic is a nucleic acid encoding a protein therapeutic, the nucleic acid can be administered in vivo to promote expression of its encoded protein, by constructing it as part of an appropriate nucleic acid expression vector and administering it so that it becomes intracellular, e.g., by use of a retroviral vector (U.S. Pat. No. 4,980,286), or by direct injection, or by use of microparticle bombardment (e.g., a gene gun; Biolistic, Dupont), or by coating it with lipids, cell-surface receptors or transfecting agents, or by administering it in linkage to a homeobox-like peptide which is known to enter the nucleus (e.g., Joliot et al., 1991, Proc. Natl. Acad. Sci. USA 88:1864-1868), etc. Alternatively, a nucleic acid therapeutic can be introduced intracellularly and incorporated by homologous recombination within host cell DNA for expression.

[0093] The present invention also provides pharmaceutical compositions. Such compositions comprise a therapeutically effective amount of a therapeutic, and a pharmaceutically acceptable carrier. In a specific embodiment, the term “pharmaceutically acceptable” means approved by a regulatory agency of the Federal or a state government or listed in the U.S. Pharmacopeia or other generally recognized pharmacopeia for use in animals, and more particularly, in humans. The term “carrier” refers to a diluent, adjuvant, excipient, or vehicle with which the therapeutic is administered. Such pharmaceutical carriers can be sterile liquids, such as water and oils, including those of petroleum, animal, vegetable or synthetic origin, including but not limited to peanut oil, soybean oil, mineral oil, sesame oil and the like. Water is a preferred carrier when the pharmaceutical composition is administered orally. Saline and aqueous dextrose are preferred carriers when the pharmaceutical composition is administered intravenously. Saline solutions and aqueous dextrose and glycerol solutions are preferably employed as liquid carriers for injectable solutions. Suitable pharmaceutical excipients include starch, glucose, lactose, sucrose, gelatin, malt, rice, flour, chalk, silica gel, sodium stearate, glycerol monostearate, talc, sodium chloride, dried skim milk, glycerol, propylene, glycol, water, ethanol and the like. The composition, if desired, can also contain minor amounts of wetting or emulsifying agents, or pH buffering agents. These compositions can take the form of solutions, suspensions, emulsions, tablets, pills, capsules, powders, sustained-release formulations and the like. The composition can be formulated as a suppository, with traditional binders and carriers such as triglycerides. Oral formulation can include standard carriers such as pharmaceutical grades of mannitol, lactose, starch, magnesium stearate, sodium saccharine, cellulose, magnesium carbonate, etc. Examples of suitable pharmaceutical carriers are described in “Remington's Pharmaceutical Sciences” by E. W. Martin. Such compositions will contain a therapeutically effective amount of the therapeutic, preferably in purified form, together with a suitable amount of carrier so as to provide the form for proper administration to the patient. The formulation should suit the mode of administration.

[0094] In a preferred embodiment, the composition is formulated, in accordance with routine procedures, as a pharmaceutical composition adapted for intravenous administration to human beings. Typically, compositions for intravenous administration are solutions in sterile isotonic aqueous buffer. Where necessary, the composition may also include a solubilizing agent and a local anesthetic such as lidocaine to ease pain at the site of the injection. Generally, the ingredients are supplied either separately or mixed together in unit dosage form, for example, as a dry lyophilized powder or water-free concentrate in a hermetically sealed container such as an ampoule or sachette indicating the quantity of active agent. Where the composition is to be administered by infusion, it can be dispensed with an infusion bottle containing sterile pharmaceutical grade water or saline. Where the composition is administered by injection, an ampoule of sterile water or saline for injection can be provided so that the ingredients may be mixed prior to administration.

[0095] The therapeutics of the invention can be formulated as neutral or salt forms. Pharmaceutically acceptable salts include those formed with free carboxyl groups such as those derived from hydrochloric, phosphoric, acetic, oxalic, tartaric acids, etc., those formed with free amine groups such as those derived from isopropylamine, triethylamine, 2-ethylamino ethanol, histidine, procaine, etc., and those derived from sodium, potassium, ammonium, calcium, and ferric hydroxides, etc.

[0096] The amount of the therapeutic of the invention which will be effective in the treatment of a particular disorder or condition will depend on the nature of the disorder or condition, and can be determined by standard clinical techniques. In addition, in vitro assays may optionally be employed to help identify optimal dosage ranges. The precise dose to be employed in the formulation will also depend on the route of administration, and the seriousness of the disease or disorder, and should be decided according to the judgment of the practitioner and each patient's circumstances. However, suitable dosage ranges for intravenous administration are generally about 20-500 micrograms of active compound per kilogram body weight. Suitable dosage ranges for intranasal administration are generally about 0.01 pg/kg body weight to 1 mg/kg body weight. Effective doses may be extrapolated from dose-response curves derived from in vitro or animal model test systems.

[0097] Suppositories generally contain active ingredient in the range of 0.5% to 10% by weight; oral formulations preferably contain 10% to 95% active ingredient.

[0098] The invention also provides a pharmaceutical pack or kit comprising one or more containers filled with one or more of the ingredients of the pharmaceutical compositions of the invention. Optionally associated with such container(s) can be a notice in the form prescribed by a governmental agency regulating the manufacture, use or sale of pharmaceuticals or biological products, which notice reflects approval by the agency of manufacture, use or sale for human administration.

[0099] The kits of the present invention can also contain expression vectors encoding the essential components of the complex machinery, which components after being expressed can be reconstituted in order to form a biologically active complex. Such a kit preferably also contains the required buffers and reagents. Optionally associated with such container(s) can be instructions for use of the kit and/or a notice in the form prescribed by a governmental agency regulating the manufacture, use or sale of pharmaceuticals or biological products, which notice reflects approval by the agency of manufacture, use or sale for human administration.

[0100] The invention furthe relates to a method of treatment, wherein an effective amount of a FADS2 interacting molecule or inhibitor is administered to a subject suffering from a neurodegenerative disease, preferably Alzheimer's disease.

[0101] With respect to this method of the invention, all embodiments apply given above for the use of the invention.

[0102] The invention further relates to a method for identifying a gamma secretase modulator and/or beta-secretase modulator, comprising the following steps:
[0103] a. identifying of a FADS2-interacting molecule by determining whether a given test compound is a FADS2-interacting molecule,
[0104] b. determining whether the FADS2-interacting molecule of step a) is capable of modulating gamma secretase activity or beta-secretase activity.

[0105] In a preferred embodiment of the invention, in step a) the test compound is brought into contact with FADS2 and the interaction of FADS2 with the test compound is determined. Preferably, it is measured whether the candidate molecule is bound to FADS2.

[0106] The method of the invention is preferably performed in the context of a high throughput assay. Such assays are known to the person skilled in the art.

[0107] Test or candidate molecules to be screened can be provided as mixtures of a limited number of specified compounds, or as compound libraries, peptide libraries and the like. Agents/molecules to be screened may also include all forms of antisera, antisense nucleic acids, etc., that can modulate complex activity or formation. Exemplary candidate molecules and libraries for screening are set forth below.

[0108] Screening the libraries can be accomplished by any of a variety of commonly known methods. See, e.g., the following references, which disclose screening of peptide libraries: Parmley and Smith, 1989, Adv. Exp. Med. Biol. 251:215-218; Scott and Smith, 1990, Science 249:386-390; Fowlkes et al., 1992, BioTechniques 13:422-427; Oldenburg et al., 1992, Proc. Natl. Acad. Sci. USA 89:5393-5397; Yu et al., 1994, Cell 76:933-945; Staudt et al., 1988, Science 241:577-580; Bock et al., 1992, Nature 355:564-566; Tuerk et al., 1992, Proc. Natl. Acad. Sci. USA 89:6988-6992; Ellington et al., 1992, Nature 355:850-852; U.S. Pat. No. 5,096,815, U.S. Pat. No. 5,223,409, and U.S. Pat. No. 5,198,346, all to Ladner et al.; Rebar and Pabo, 1993, Science 263:671-673; and International Patent Publication No. WO 94/18318.

[0109] In a specific embodiment, screening can be carried out by contacting the library members with a FADS2 immobilized on a solid phase, and harvesting those library members that bind to the protein (or encoding nucleic acid or derivative). Examples of such screening methods, termed “panning” techniques, are described by way of example in Parmley and Smith, 1988, Gene 73:305-318; Fowlkes et al., 1992, BioTechniques 13:422-427; International Patent Publication No. WO 94/18318; and in references cited hereinabove.

[0110] In a specific embodiment, FADS 2 fragments and/or analogs, especially peptidomimetics, are screened for activity as competitive or non-competitive inhibitors of the formation of a complex of FADS2 with another proteins, e.g. the proteins given in Table 1 (amount of complex or composition of complex) or FADS2 activity in the cell, which thereby inhibit complex activity or formation in the cell.

[0111] In one embodiment, agents that modulate (i.e., antagonize or agonize) FADS2 activity or FADS2-protein complex formation can be screened for using a binding inhibition assay, wherein agents are screened for their ability to modulate formation of a complex under aqueous, or physiological, binding conditions in which complex formation occurs in the absence of the agent to be tested. Agents that interfere with the formation of complexes of the invention are identified as antagonists of complex formation. Agents that promote the formation of complexes are identified as agonists of complex formation. Agents that completely block the formation of complexes are identified as inhibitors of complex formation.

[0112] Methods for screening may involve labeling the component proteins of the complex with radioligands (e.g., ¹²⁵I or ³H), magnetic ligands (e.g., paramagnetic beads covalently attached to photobiotin acetate), fluorescent ligands (e.g., fluorescein or rhodamine), or enzyme ligands (e.g., luciferase or β-galactosidase). The reactants that bind in solution can then be isolated by one of many techniques known in the art, including but not restricted to, co-immunoprecipitation of the labeled complex moiety using antisera against the unlabeled binding partner (or labeled binding partner with a distinguishable marker from that used on the second labeled complex moiety), immunoaffinity chromatography, size exclusion chromatography, and gradient density centrifugation. In a preferred embodiment, the labeled binding partner is a small fragment or peptidomimetic that is not retained by a commercially available filter. Upon binding, the labeled species is then unable to pass through the filter, providing for a simple assay of complex formation.

[0113] Methods commonly known in the art are used to label at least one of the component members of the complex. Suitable labeling methods include, but are not limited to, radiolabeling by incorporation of radiolabeled amino acids, e.g., ³H-leucine or ³⁵S-methionine, radiolabeling by post-translational iodination with ¹²⁵I or ¹³¹I using the chloramine T method, Bolton-Hunter reagents, etc., or labeling with ³²P using phosphorylase and inorganic radiolabeled phosphorous, biotin labeling with photobiotin-acetate and sunlamp exposure, etc. In cases where one of the members of the complex is immobilized, e.g., as described infra, the free species is labeled. Where neither of the interacting species is immobilized, each can be labeled with a distinguishable marker such that isolation of both moieties can be followed to provide for more accurate quantification, and to distinguish the formation of homomeric from heteromeric complexes. Methods that utilize accessory proteins that bind to one of the modified interactants to improve the sensitivity of detection, increase the stability of the complex, etc., are provided.

[0114] Typical binding conditions are, for example, but not by way of limitation, in an aqueous salt solution of 10-250 mM NaCl, 5-50 mM Tris-HCl, pH 5-8, and 0.5% Triton X-100 or other detergent that improves specificity of interaction. Metal chelators and/or divalent cations may be added to improve binding and/or reduce proteolysis. Reaction temperatures may include 4, 10, 15, 22, 25, 35, or 42 degrees Celsius, and time of incubation is typically at least 15 seconds, but longer times are preferred to allow binding equilibrium to occur. Particular complexes can be assayed using routine protein binding assays to determine optimal binding conditions for reproducible binding.

[0115] The physical parameters of complex formation can be analyzed by quantification of complex formation using assay methods specific for the label used, e.g., liquid scintillation counting for radioactivity detection, enzyme activity for enzyme-labeled moieties, etc. The reaction results are then analyzed utilizing Scatchard analysis, Hill analysis, and other methods commonly known in the arts (see, e.g., Proteins, Structures, and Molecular Principles, 2^{nd} Edition (1993) Creighton, Ed., W.H. Freeman and Company, New York).

[0116] In a second common approach to binding assays, one of the binding species is immobilized on a filter, in a microtiter plate well, in a test tube, to a chromatography matrix, etc., either covalently or non-covalently. Proteins can be covalently immobilized using any method well known in the art, for example, but not limited to the method of Kadonaga and Tjian, 1986, Proc. Natl. Acad. Sci. USA 83:5889-5893, i.e., linkage to a cyanogen-bromide derivatized substrate such as CNBr-Sepharose 4B (Pharmacia). Where needed, the use of spacers can reduce steric hindrance by the substrate. Non-covalent attachment of proteins to a substrate include, but are not limited to, attachment of a protein to a charged surface, binding with specific antibodies, binding to a third unrelated interacting protein, etc.

[0117] Assays of agents (including cell extracts or a library pool) for competition for binding of one member of a complex (or derivatives thereof) with another member of the complex labeled by any means (e.g., those means described above) are provided to screen for competitors or enhancers of complex formation.

[0118] In specific embodiments, blocking agents to inhibit non-specific binding of reagents to other protein components, or absorptive losses of reagents to plastics, immobilization matrices, etc., are included in the assay mixture. Blocking agents include, but are not restricted to bovine serum albumin, casein, nonfat dried milk, Denhardt's reagent, Ficoll, polyvinylpyrolidine, nonionic detergents (NP40, Triton X-100, Tween 20, Tween 80, etc.), ionic detergents (e.g., SDS, LDS, etc.), polyethylene glycol, etc. Appropriate blocking agent concentrations allow complex formation.

[0119] After binding is performed, unbound, labeled protein is removed in the supernatant, and the immobilized protein retaining any bound, labeled protein is washed extensively. The amount of bound label is then quantified using standard methods in the art to detect the label as described, supra.

[0120] In another specific embodiments screening for modulators of the protein complexes/protein as provided herein can be carried out by attaching those and/or the antibodies as provided herein to a solid carrier.

[0121] The preparation of such an array containing different types of proteins, including antibodies) is well known in the art and is apparent to a person skilled in the art (see e.g. Ekins et al., 1989, J. Pharm. Biomed. Anal. 7:155-168; Mitchell et al. 2002, Nature Biotechnol. 20:225-229; Petricoin et al., 2002, Lancet 359:572-577; Templin et al., 2001, Trends Biotechnol. 20:160-166; Wilson and Nock, 2001, Curr. Opin. Chem. Biol. 6:81-85; Lee et al., 2002 Science 295:1702-1705; MacBeath and Schreiber, 2000, Science 289:1760; Blawas and Reichert, 1998, Biomaterials 19:595; Kane et al., 1999, Biomaterials 20:2363; Chen et al., 1997, Science 276:1425; Vaugham et al., 1996, Nature Biotechnol. 14:309-314; Mahler et al., 1997, Immunotechnology 3:31-43; Roberts et al., 1999, Curr. Opin. Chem. Biol. 3:268-273; Nord et al., 1997, Nature Biotechnol. 15:772-777; Nord et al., 2001, Eur. J. Biochem. 268:4269-4277; Brody and Gold, 2000, Rev. Mol. Biotechnol. 74:5-13; Karlstroem and Nygren, 2001, Anal. Biochem. 295:22-30; Nelson et al., 2000, Electrophoresis 21:1155-1163; Honore et al., 2001, Expert Rev. Mol. Diagn. 3:265-274; Albala, 2001, Expert Rev. Mol. Diagn. 2:145-152, Figeys and Pinto, 2001, Electrophoresis 2:208-216 and references in the publications listed here).

[0122] Complexes can be attached to an array by different means as will be apparent to a person skilled in the art. Complexes can for example be added to the array via a TAP-tag (as described in WO/0009716 and in Rigaut et al., 1999, Nature Biotechnol. 10:1030-1032) after the purification step or by another suitable purification scheme as will be apparent to a person skilled in the art.

[0123] Optionally, the proteins of the complex can be cross-linked to enhance the stability of the complex. Different methods to cross-link proteins are well known in the art. Reactive end-groups of cross-linking agents include but are not limited to —COOH, —SH, —NH2 or N-oxy-succinamate.

[0124] The spacer of the cross-linking agent should be chosen with respect to the size of the complex to be cross-linked. For small protein complexes, comprising only a few proteins, relatively short spacers are preferable in order to reduce the likelihood of cross-linking separate complexes in the reaction mixture. For larger protein complexes, additional use of larger spacers is preferable in order to facilitate cross-linking between proteins within the complex.

[0125] It is preferable to check the success-rate of cross-linking before linking the complex to the carrier.

[0126] As will be apparent to a person skilled in the art, the optimal rate of cross-linking need to be determined on a case by case basis. This can be achieved by methods well known in the art, some of which are exemplary described below.

[0127] A sufficient rate of cross-linking can be checked f.e. by analysing the cross-linked complex vs. a non-cross-linked complex on a denaturating protein gel.

[0128] If cross-linking has been performed successfully, the proteins of the complex are expected to be found in the same lane, whereas the proteins of the non-cross-linked complex are expected to be separated according to their individual characteristics. Optionally the presence of all proteins of the complex can be further checked by peptide-sequencing of proteins in the respective bands using methods well known in the art such as mass spectrometry and/or Edman degradation.

[0129] In addition, a rate of crosslinking which is too high should also be avoided. If cross-linking has been carried out too extensively, there will be an increasing amount of cross-linking of the individual protein complex, which potentially interferes with a screening for potential binding partners and/or modulators etc. using the arrays.

[0130] The presence of such structures can be determined by methods well known in the art and include e.g. gel-filtration experiments comparing the gel filtration profile solutions containing cross-linked complexes vs. uncross-linked complexes.

[0131] Optionally, functional assays as will be apparent to a person skilled in the art, some of which are exemplarily provided herein, can be performed to check the integrity of the complex.

[0132] Alternatively, the proteins or the protein can be expressed as a single fusion protein and coupled to the matrix as will be apparent to a person skilled in the art.

[0133] Optionally, the attachment of the complex or proteins or antibody as outlined above can be further monitored by various methods apparent to a person skilled in the art. Those include, but are not limited to surface plasmon resonance (see e.g. McDonnel, 2001, Curr. Opin. Chem. Biol. 5:572-577; Lee, 2001, Trends Biotechnol. 19:217-222; Weinberger et al., 2000, 1:395-416; Pearson et al., 2000, Ann. Clin. Biochem. 37:119-145; Vely et al., 2000, Methods Mol. Biol. 121:313-321; Slepak, 2000, J. Mol. Recognit. 13:20-26.

[0134] Exemplary assays useful for measuring the production of Abeta-40 and Abeta-42 peptides by ELISA include but are not limited to those described in Vassar R et al., 1999, Science, 286:735-41.

[0135] Exemplary assays useful for measuring the production of C-terminal APP fragments in cell lines or transgenic animals by western blot include but are not limited to those described in Yan R et al., 1999, Nature, 402:533-7.

[0136] Exemplary assays useful for measuring the proteolytic activity of beta- or gamma secretases towards bacterially expressed APP fragments in vitro (e.g. by modifying the expression of one or several interacting proteins in cells by means of RNAi (siRNA) and/or plasmids encoding the interacting protein(s)) of the Presenilin 2 complex, Nicastrin complex, BACE1-complex, PTK7-complex include but are not limited to those described in Tian G et al., 2002, J Biol Chem, 277:31499-505.

[0137] Exemplary assays useful for measuring transactivation of a Gal4-driven reporter gene (e.g. by modifying the expression of one or several interacting proteins in cells by means of RNAi (siRNA) and/or plasmids encoding the interacting protein(s)) of the Presenilin 2 complex, Nicastrin complex, PTK7-complex, BACE1-complex, include but are not limited to those described in Cao X et al., 2001, Science, 293:115-20.

[0138] Any molecule known in the art can be tested for its ability to be an interacting molecule or inhibitor according to the present invention. Candidate molecules can be directly provided to a cell expressing the FADS2-complex machinery, or, in the case of candidate proteins, can be provided by providing their encoding nucleic acids under conditions in which the nucleic acids are recombinantly expressed to produce the candidate protein.

[0139] The method of the invention is well suited to screen chemical libraries for molecules which modulate, e.g., inhibit, antagonize, or agonize, the amount of, activity of, or protein component composition of the complex. The chemical libraries can be peptide libraries, peptidomimetic libraries, chemically synthesized libraries, recombinant, e.g., phage display libraries, and in vitro translation-based libraries, other non-peptide synthetic organic libraries, etc.

[0140] Exemplary libraries are commercially available from several sources (ArQule, Tripos/PanLabs, ChemDesign, Pharmacopoeia). In some cases, these chemical libraries are generated using combinatorial strategies that encode the identity of each member of the library on a substrate to which the member compound is attached, thus allowing direct and immediate identification of a molecule that is an effective modulator. Thus, in many combinatorial approaches, the position on a plate of a compound specifies that compound's composition. Also, in one example, a single plate position may have from 1-20 chemicals that can be screened by administration to a well containing the interactions of interest. Thus, if modulation is detected, smaller and smaller pools of interacting pairs can be assayed for the modulation activity. By such methods, many candidate molecules can be screened.

[0141] Many diversity libraries suitable for use are known in the art and can be used to provide compounds to be tested according to the present invention. Alternatively, libraries can be constructed using standard methods. Chemical (synthetic) libraries, recombinant expression libraries, or polysome-based libraries are exemplary types of libraries that can be used.

[0142] The libraries can be constrained or semirigid (having some degree of structural rigidity), or linear or nonconstrained. The library can be a cDNA or genomic expression library, random peptide expression library or a chemically synthesized random peptide library, or non-peptide library. Expression libraries are introduced into the cells in which the assay occurs, where the nucleic acids of the library are expressed to produce their encoded proteins.

[0143] In one embodiment, peptide libraries that can be used in the present invention may be libraries that are chemically synthesized in vitro. Examples of such libraries are given in Houghten et al., 1991, Nature 354:84-86, which describes mixtures of free hexapeptides in which the first and second residues in each peptide were individually and specifically defined; Lam et al., 1991, Nature 354:82-84, which describes a “one bead, one peptide” approach in which a solid phase split synthesis scheme produced a library of peptides in which each bead in the collection had immobilized thereon a single, random sequence of amino acid residues; Medynski, 1994, Bio/Technology 12:709-710, which describes split synthesis and T-bag synthesis methods; and Gallop et al., 1994, J. Med. Chem. 37:1233-1251. Simply by way of other examples, a combinatorial library may be prepared for use, according to the methods of Ohlmeyer et al., 1993, Proc. Natl. Acad. Sci. USA 90:10922-10926; Erb et al., 1994, Proc. Natl. Acad. Sci. USA 91:11422-11426; Houghten et al., 1992, Biotechniques 13:412; Jayawickreme et al., 1994, Proc. Natl. Acad. Sci. USA 91:1614-1618; or Salmon et al., 1993, Proc. Natl. Acad. Sci. USA 90:11708-11712. PCT Publication No. WO 93/20242 and Brenner and Lerner, 1992, Proc. Natl. Acad. Sci. USA 89:5381-5383 describe “encoded combinatorial chemical libraries,” that contain oligonucleotide identifiers for each chemical polymer library member.

[0144] In a preferred embodiment, the library screened is a biological expression library that is a random peptide phage display library, where the random peptides are constrained (e.g., by virtue of having disulfide bonding).

[0145] Further, more general, structurally constrained, organic diversity (e.g., nonpeptide) libraries, can also be used. By way of example, a benzodiazepine library (see e.g., Bunin et al., 1994, Proc. Natl. Acad. Sci. USA 91:4708-4712) may be used.

[0146] Conformationally constrained libraries that can be used include but are not limited to those containing invariant cysteine residues which, in an oxidizing environment, cross-link by disulfide bonds to form cystines, modified peptides (e.g., incorporating fluorine, metals, isotopic labels, are phosphorylated, etc.), peptides containing one or more non-naturally occurring amino acids, non-peptide structures, and peptides containing a significant fraction of -carboxyglutamic acid.

[0147] Libraries of non-peptides, e.g., peptide derivatives (for example, that contain one or more non-naturally occurring amino acids) can also be used. One example of these are peptoid libraries (Simon et al., 1992, Proc. Natl. Acad. Sci. USA 89:9367-9371). Peptoids are polymers of non-natural amino acids that have naturally occurring side chains attached not to the α carbon but to the backbone amino nitrogen. Since peptoids are not easily degraded by human digestive enzymes, they are advantageously more easily adaptable to drug use. Another example of a library that can be used, in which the amide functionalities in peptides have been permethylated to generate a chemically transformed combinatorial library, is described by Ostresh et al., 1994, Proc. Natl. Acad. Sci. USA 91:11138-11142).

[0148] The members of the peptide libraries that can be screened according to the invention are not limited to containing the 20 naturally occurring amino acids. In particular, chemically synthesized libraries and polysome based libraries allow the use of amino acids in addition to the 20 naturally occurring amino acids (by their inclusion in the precursor pool of amino acids used in library production). In specific embodiments, the library members contain one or more non-natural or non-classical amino acids or cyclic peptides. Non-classical amino acids include but are not limited to the D-isomers of the common amino acids, -amino isobutyric acid, 4-aminobutyric acid, Abu, 2-amino butyric acid; .-Abu, .-Ahx, 6-amino hexanoic acid; Aib, 2-amino isobutyric acid; 3-amino propionic acid; ornithine; norleucine; norvaline, hydroxyproline, sarcosine, citrulline, cysteic acid, t-butylglycine, t-butylalanine, phenylglycine, cyclohexylalanine, β-alanine, designer amino acids such as β-methyl amino acids, [symbol] -methyl amino acids, [symbol] -methyl amino acids, fluoro-amino acids and amino acid analogs in general. Furthermore, the amino acid can be D (dextrorotary) or L (levorotary).

[0149] In a specific embodiment, fragments and/or analogs of complexes of the invention, or protein components thereof, especially peptidomimetics, are screened for activity as competitive or non-competitive inhibitors of complex activity or formation.

[0150] In another embodiment of the present invention, combinatorial chemistry can be used to identify modulators of a the complexes. Combinatorial chemistry is capable of creating libraries containing hundreds of thousands of compounds, many of which may be structurally similar, While high throughput screening programs are capable of screening these vast libraries for affinity for known targets, new approaches have been developed that achieve libraries of smaller dimension but which provide maximum chemical diversity. (See e.g., Matter, 1997, J. Med. Chem. 40:1219-1229).

[0151] One method of combinatorial chemistry, affinity fingerprinting, has previously been used to test a discrete library of small molecules for binding affinities for a defined panel of proteins. The fingerprints obtained by the screen are used to predict the affinity of the individual library members for other proteins or receptors of interest (in the instant invention, the protein complexes of the present invention and protein components thereof.) The fingerprints are compared with fingerprints obtained from other compounds known to react with the protein of interest to predict whether the library compound might similarly react. For example, rather than testing every ligand in a large library for interaction with a complex or protein component, only those ligands having a fingerprint similar to other compounds known to have that activity could be tested. (See, e.g., Kauvar et al., 1995, Chem. Biol. 2:107-118; Kauvar, 1995, Affinity fingerprinting, Pharmaceutical Manufacturing International. 8:25-28; and Kauvar, Toxic-Chemical Detection by Pattern Recognition in New Frontiers in Agrochemical Immunoassay, Kurtz, Stanker and Skerritt (eds), 1995, AOAC: Washington, D.C., 305-312).

[0152] Kay et al. (1993, Gene 128:59-65) disclosed a method of constructing peptide libraries that encode peptides of totally random sequence that are longer than those of any prior conventional libraries. The libraries disclosed in Kay et al. encode totally synthetic random peptides of greater than about 20 amino acids in length. Such libraries can be advantageously screened to identify complex modulators. (See also U.S. Pat. No. 5,498,538 dated Mar. 12, 1996; and PCT Publication No. WO 94/18318 dated Aug. 18, 1994).

[0153] A comprehensive review of various types of peptide libraries can be found in Gallop et al., 1994, J. Med. Chem. 37:1233-1251.

[0154] In a preferred embodiment, the interaction of the test compound with FADS2 results in an inhibition of FADS2 activity.

[0155] According to a preferred embodiment, in step b) the ability of the gamma secretase to cleave APP is measured. This can be measured as indicated above.

[0156] Further, the invention also relates to a method for preparing a pharmaceutical composition for the treatment of neurodegenerative diseases, comprising the following steps:
[0157] a) identifying a gamma secretase modulator and/or beta-secretase modulator according to the method of the invention, and
[0158] b) formulating the gamma secretase modulator to a pharmaceutical composition.

[0159] With respect to the pharmaceutical composition, all embodiments as indicated above apply also here.

[0160] The invention further relates to protein complexes cmprising FADS2 and at least a further protein. As indicated above, in the context of the present invention, these protein complexes have been identified for the first time.

[0161] Therefore, in a further aspect, the invention realtes to a protein complex comprising
[0162] a) PADS2 and
[0163] b) either one or more proteins of the Nicastrin (a) complex, of the Nicastrin (b) complex, of the Nicastrin (c) complex, of the BACE1-complex (a), of the BACE1-complex (b), of the Psen2-complex or of the PTK7 complex.

[0164] In a preferred embodiment, the one ore more proteins of the Nicastrin (a) complex are selected from the group consisting of
[0165] (i) “18 kDa microsomal signal peptidase subunit” (SEQ ID No:53)
[0166] (ii) “25 kDa microsomal signal peptidase subunit” (SEQ ID No:119)
[0167] (iii) “ATP-binding cassette, sub-family A, member 3” (SEQ ID No:103),
[0168] (iv) “Aph-1a” (SEQ ID No:1),
[0169] (v) “BACE1” (SEQ ID No:68),
[0170] (vi) “BSCv protein” (SEQ ID No:70),
[0171] (vii) “CGI-13” (SEQ ID No:72)
[0172] (viii) “Casein kinase II beta chain” (SEQ ID No:74),
[0173] (ix) “Cathepsin B” (SEQ ID No:75),
[0174] (x) “ENSG00000144840” (SEQ ID No:79)
[0175] (xi) “FLJ13977” (SEQ ID No:81),
[0176] (xii) “FLJ20342” (SEQ ID No:56),
[0177] (xiii) “FLJ20481” (SEQ ID No:82),
[0178] (xiv) “FLJ22390” (SEQ ID No:84),
[0179] (xv) “Hypothetical protein tyrosine phosphatase ensg00000149185” (SEQ ID No:86),
[0180] (xvi) “ICAM-2” (SEQ ID No:87)
[0181] (xvii) “KIAA1181” (SEQ ID No:88),
[0182] (xiii) “KIAA1533” (SEQ ID No:89),
[0183] (xix) “Mesenchymal stem cell protein DSCD75” (SEQ ID No:91)
[0184] (xx) “NICE-3” (SEQ ID No:58),
[0185] (xxi) “Neurotrypsin” (SEQ ID No:92),
[0186] (xxii) “Nicastrin” (SEQ ID No:9),
[0187] (xxiii) “PP1, regulatory subunit 15B” (SEQ ID No:93)
[0188] (xxiv) “Pen-2” (SEQ ID No:10)
[0189] (xxv) “Presenilin-1” (SEQ ID No:14),
[0190] (xxvi) “Presenilin-2” (SEQ ID No:66),
[0191] (xxvii) “Protein amplified in osteosarcoma (OS-9)” (SEQ ID No:94)
[0192] (xxviii) “Protein similar to stromal cell-derived factor 2” (SEQ ID No:95)
[0193] (xxix) “Protocadherin beta 8” (SEQ ID No:96)
[0194] (xxx) “REP8 protein” (SEQ ID No:97)
[0195] (xxxi) “RING finger protein 5” (SEQ ID No:98)
[0196] (xxxii) “Retinal short-chain dehydrogenase/reductase retSDR2” (SEQ ID No:99)
[0197] (xxxiii) “Stromal cell-derived factor 2-like 1” (SEQ ID No:100)
[0198] (xxxiv) “Thioredoxin domain-containing protein” (SEQ ID No:101), and
[0199] (xxxv) “Voltage-dependent anion channel 1” (SEQ ID No:102),
[0200] In a preferred embodiment, the one or more proteins of the Nicastrin (b) complex are selected from the group consisting of of
[0201] (i) “18 kDa microsomal signal peptidase subunit” (SEQ ID No:53)
[0202] (ii) “25 kDa microsomal signal peptidase subunit” (SEQ ID No:119)
[0203] (iii) “ATP-binding cassette, sub-family A, member 3” (SEQ ID No:103)
[0204] (iv) “Aph-1a” (SEQ ID No:1)
[0205] (v) “BACE1” (SEQ ID No:38)
[0206] (vi) “BSCv protein (FRAGMENT)” (SEQ ID No:70)
[0207] (vii) “CAMK4” (SEQ ID No:104)
[0208] (viii) “CGI-13” (SEQ ID No:72)
[0209] (ix) “Casein kinase II beta chain” (SEQ ID No:74)
[0210] (x) “Cathepsin B” (SEQ ID No:75)
[0211] (xi) “DCTN1” (SEQ ID No:106)
[0212] (xii) “ENSG00000144840” (SEQ ID No:79)
[0213] (xiii) “FACL3” (SEQ ID No:108)
[0214] (xiv) “FACL4” (SEQ ID No:109)
[0215] (xv) “FLJ13977” (SEQ ID No:81)
[0216] (xvi) “FLJ20342” (SEQ ID No:56)
[0217] (xvii) “FLJ20481” (SEQ ID No:82)
[0218] (xiii) “FLJ22390” (SEQ ID No:84)
[0219] (xix) “ICAM-2” (SEQ ID No:87)
[0220] (xx) “KIAA0095” (SEQ ID No:110)
[0221] (xxi) “KIAA0922” (SEQ ID No:111)
[0222] (xxii) “KIAA1181 (FRAGMENT)” (SEQ ID No:88)
[0223] (xxiii) “KIAA1533 (FRAGMENT)” (SEQ ID No:89)
[0224] (xxiv) “Mesenchymal stem cell protein DSCD75” (SEQ ID No:91)
[0225] (xxv) “NICE-3” (SEQ ID No:58)
[0226] (xxvi) “Neurotrypsin” (SEQ ID No:92)
[0227] (xxvii) “Nicastrin” (SEQ ID No:9)
[0228] (xxiii) “PAS domain containing serine/threonine kinase” (SEQ ID No:112)
[0229] (xxix) “PP1, regulatory subunit 15B” (SEQ ID No:93)
[0230] (xxx) “Pen-2” (SEQ ID No:10)
[0231] (xxxi) “Presenilin-1” (SEQ ID No:14)
[0232] (xxxii) “Presenilin-2” (SEQ ID No:66)
[0233] (xxxiii) “Protein amplified in osteosarcoma (OS-9)” (SEQ ID No:94)
[0234] (xxxiv) “Protein similar to stromal cell-derived factor 2” (SEQ ID No:95)
[0235] (xxxv) “Protocadherin beta 8” (SEQ ID No:96)
[0236] (xxxvi) “REP8 protein” (SEQ ID No:97)
[0237] (xxxvii) “RING finger protein 5” (SEQ ID No:98)
[0238] (xxxiii) “Retinal short-chain dehydrogenase/reductase retSDR2” (SEQ ID No:99)
[0239] (xxxix) “Stromal cell-derived factor 2-like 1” (SEQ ID No:100)
[0240] (xl) “Thioredoxin domain-containing protein” (SEQ ID No:101)
[0241] (xli) “homolog of yeast golgi membrane protein yif1p (yip1p-interacting factor)”(SEQ ID No:113), and
[0242] (xlii) “tyrosine phosphatase ensg00000149185” (SEQ ID No:86),
[0243] In a preferred embodiment, the one or more proteins of the Nicastrin (c) complex are selected from the group consisting of
[0244] (i) “APP-C99” (SEQ ID No:120)
[0245] (ii) “Nicastrin” (SEQ ID No:9)
[0246] (iii) “Psen1” (SEQ ID No:3)
[0247] (iv) “aph-1a” (SEQ ID No:1)
[0248] (v) “APP” (SEQ ID No:23)
[0249] (vi) “CtnnA1” (SEQ ID No:47)
[0250] (vii) “CtnnA2” (SEQ ID No:48)
[0251] (viii) “CtnnB1” (SEQ ID No:46)
[0252] (ix) “CtnnD1” (SEQ ID No:49)
[0253] (x) “JUP” (SEQ ID No:2)
[0254] (xi) “NCadh” (SEQ ID No:50)
[0255] (xii) “ACAT1” (SEQ ID No:4)
[0256] (xiii) “CGI-13” (SEQ ID No:72)
[0257] (xiv) “CK2B” (SEQ ID No:59)
[0258] (xv) “CLGN” (SEQ ID No:54)
[0259] (xvi) “ECSIT” (SEQ ID No:55)
[0260] (xvii) “FACL3” (SEQ ID No:11)
[0261] (xiii) “FLJ20481” (SEQ ID No:82)
[0262] (xix) “ITM2C” (SEQ ID No:13)
[0263] (xx) “ITPR1” (SEQ ID No:16)
[0264] (xxi) “KIAA0363” (SEQ ID No:105)
[0265] (xxii) “MDR1” (SEQ ID No:18)
[0266] (xxiii) “Neurotrypsin” (SEQ ID No:19)
[0267] (xxiv) “PTP LOC114971” (SEQ ID No:60)
[0268] (xxv) “RetSDR2” (SEQ ID No:21)
[0269] (xxvi) “SFXN1” (SEQ ID No:24)
[0270] (xxvii) “SPC18” (SEQ ID No:26)
[0271] (xxiii) “SPC22” (SEQ ID No:27)
[0272] (xxix) “SPC25” (SEQ ID No:28)
[0273] (xxx) “SPTLC2” (SEQ ID No:117)
[0274] (xxxi) “stearoyl-CoA desaturase” (SEQ ID No:29)
[0275] (xxxii) “STT3” (SEQ ID No:61)
[0276] (xxxiii) “TMP21” (SEQ ID No:30)
[0277] (xxxiv) “UGCGL1” (SEQ ID No:45)
[0278] (xxxv) “visinin-like 1” (SEQ ID No:37)
[0279] (xxxvi) “Wolframin” (SEQ ID No:67)
[0280] (xxxvii) “YME1L1” (SEQ ID No:32)
[0281] In a preferred embodiment, the one or more proteins of BACE1 (a) complex are selected from the group consisting of
[0282] (i) “CGI-13” (SEQ ID No:72)
[0283] (ii) “Cadherin EGF LAG seven-pass G-type receptor 2” (SEQ ID No:35)
[0284] (iii) “Calsyntenin 1” (SEQ ID No:36)
[0285] (iv) “Delta-like homolog” (SEQ ID No:118)
[0286] (v) “FLJ30668” (SEQ ID No:69)
[0287] (vi) “FLJ39249” (SEQ ID No:71)
[0288] (vii) “ITCH” (SEQ ID No:73)
[0289] (viii) “KIAA1250” (SEQ ID No:107)
[0290] (ix) “Nicastrin” (SEQ ID No:9)
[0291] (x) “Nogo-A” (SEQ ID No:77)
[0292] (xi) “PDGFRB” (SEQ ID No:78)
[0293] (xii) “PTK7” (SEQ ID No:80)
[0294] (xiii) “SERPINA1” (SEQ ID No:83)
[0295] (xiv) “SIM TO Y71H10A. 2.P” (SEQ ID No:85)
[0296] (xv) “STX10” (SEQ ID No:65)
[0297] (xvi) “Sortilin-related receptor” (SEQ ID No:52)
[0298] (xvii) “Thioredoxin domain-containing protein” (SEQ ID No:101)
[0299] (xviii) “integral membrane transporter protein” (SEQ ID No:114)
[0300] (xix) “kinectin 1 (kinesin receptor)” (SEQ ID No:90), and
[0301] (xx) “BACE1” (SEQ ID No:38),
[0302] In a preferred embodiment, the one or more proteins of the BACE1 (b) complex are selected from the group consisting of
[0303] (i) “APP” (SEQ ID No:23)
[0304] (ii) “Nicastrin” (SEQ ID No:9)
[0305] (iii) “ACAT1” (SEQ ID No:4)
[0306] (iv) “APLP2” (SEQ ID No:22)
[0307] (v) “BRI” (SEQ ID No:5)
[0308] (vi) “calsyntenin 1” (SEQ ID No:6)
[0309] (vii) “CELSR2” (SEQ ID No:39)
[0310] (viii) “CGI-13” (SEQ ID No:72)
[0311] (ix) “DLK1” (SEQ ID No:7)
[0312] (x) “DSCD75” (SEQ ID No:8)
[0313] (ii) “PADS2” (SEQ ID No:40)
[0314] (xii) “GPR49” (SEQ ID No:115)
[0315] (xiii) “ITM2C” (SEQ ID No:13)
[0316] (xiv) “KiDins220” (SEQ ID No:17)
[0317] (xv) “LAPTM4B” (SEQ ID No:33)
[0318] (xvi) “Neurotrypsin” (SEQ ID No:19)
[0319] (xvii) “NogoA” (SEQ ID No:41)
[0320] (xviii) “OS-9” (SEQ ID No:42)
[0321] (xix) “PDGFRB” (SEQ ID No:43)
[0322] (xx) “PTK7” (SEQ ID No:44)
[0323] (xxi) “RetSDR2” (SEQ ID No:21)
[0324] (xxii) “S100alpha” (SEQ ID No:34)
[0325] (xxiii) “SORL1” (SEQ ID No:25)
[0326] (xxiv) “stearoyl-CoA desaturase” (SEQ ID No:29)
[0327] (xxv) “TMP21” (SEQ ID No:30)
[0328] (xxvi) “UGCGL1” (SEQ ID No:45)
[0329] (xxvii) “BACE1” (SEQ ID No:38)
[0330] In a preferred embodiment, the one or more proteins of the Psen2-complex are selected from the group consisting of
[0331] (i) “aph-1a” (SEQ ID No:1)
[0332] (ii) “Nicastrin” (SEQ ID No:9)
[0333] (iii) “CGI-13” (SEQ ID No:72)
[0334] (iv) “DSCD75” (SEQ ID No:8)
[0335] (v) “ECSIT” (SEQ ID No:55)
[0336] (vi) “FACL3” (SEQ ID No:11)
[0337] (vii) “FADS2” (SEQ ID No:40)
[0338] (viii) “FLJ10579” (SEQ ID No:12)
[0339] (ix) “FLJ20481” (SEQ ID No:82)
[0340] (x) “ITPR1” (SEQ ID No:16)
[0341] (xi) “KIAA0090” (SEQ ID No:57)
[0342] (xii) “MDR1” (SEQ ID No:18)
[0343] (xiii) “NicAChRa3” (SEQ ID No:62)
[0344] (xiv) “PLD3” (SEQ ID No:20)
[0345] (xv) “SFXN1” (SEQ ID No:24)
[0346] (xvi) “SLC4A2” (SEQ ID No:63)
[0347] (xvii) “SORT1” (SEQ ID No:15)
[0348] (xvii) “SPC18” (SEQ ID No:26)
[0349] (xix) “SPC22” (SEQ ID No:27)
[0350] (xx) “SPC25” (SEQ ID No:28)
[0351] (xxi) “SPTLC2” (SEQ ID No:117)
[0352] (xxii) “stearoyl-CoA desaturase” (SEQ ID No:29)
[0353] (xxiii) “STT3” (SEQ ID No:61)
[0354] (xxiv) “TMP21” (SEQ ID No:30)
[0355] (xxv) “VLCAD” (SEQ ID No:31)
[0356] (xxvi) “Wolframin” (SEQ ID No:67)
[0357] (xxvii) “YME1L1” (SEQ ID No:32), and
[0358] (xxvii) “Psen2” (SEQ ID No:121)
[0359] In a preferred embodiment, the at least one protein of PTK7 complex is selected from the group consisting of
[0360] (i) “APP” (SEQ ID No:23)
[0361] (ii) “BRI” (SEQ ID No:5)
[0362] (iii) “CELSR2” (SEQ ID No:39)
[0363] (iv) “DLK1” (SEQ ID No:7)
[0364] (v) “FADS2” (SEQ ID No:40)
[0365] (vi) “HIFPH3/EGLN3” (SEQ ID No:64)
[0366] (vii) “ITM2C” (SEQ ID No:13)
[0367] (viii) “Nap1-like” (SEQ ID No:116)
[0368] (ix) “Reelin” (SEQ ID No:51)
[0369] (x) “PTK7” (SEQ ID No:44)

[0370] Preferably, one or more of the proteins are present in the form a fusion protein comprising said protein fused to an amino acid sequence different from that of the protein.

[0371] In a further preferred embodiment, said amino acid sequence is an affinity tag or label.

[0372] The invention further relates to a process for preparing and optionally analyzing a complex of the invention or of one or more components thereof comprising the following steps:
[0373] Expressing a protein of the complex, preferably a tagged protein, in a target cell, isolating the protein complex which is attached to the protein, preferably a tagged protein, and optionally disassociating the protein complex and isolating the individual complex members.

[0374] Preferably, the tagged protein comprises two different tags which allow two separate affinity purification steps. More preferred, the two tags are separated by a cleavage site for a protease.

[0375] The invention further relates to a nucleic acid construct containing one or more nucleic acids encoding proteins of a complex according to the invention and to a host cell, containing such a nucleic acid construct.

[0376] Furthermore, the invention provides a kit comprising in one container the complex of the invention, optionally together with an antibody against the complex and/or further components such as reagents and working instructions.

[0377] The invention also relates to a kit of the invention for processing a substrate of a complex of the invention.

[0378] The invention further provides the kit according to the invention for the diagnosis or prognosis of a disease or a disease risk, preferentially for a disease or disorder such as neurodegenerative disease such as Alzheimer's disease and related neurodegenerative disorders.

[0379] The invention further provides an array in which at least a complex according to the invention is attached to a solid carrier.

[0380] The invention further provides a process for processing a substrate of a complex of the invention comprising the step of bringing into contact a complex of the invention with said substrate, such that said substrate is processed.

[0381] Furthermore, the invention relates to a pharmaceutical composition comprising the protein complex of the invention.

[0382] The invention further provides this pharmaceutical composition according to the invention for the treatment of neurodegenerative disease such as Alzheimer's disease and related neurodegenerative disorders.

[0383] Furthermore, the invention provides a method for screening for a molecule that binds to the complex of the invention, comprising the following steps:
[0384] (a) exposing said complex, or a cell or organism containing said complex, to one or more candidate molecules; and
[0385] (b) determining whether said candidate molecule is bound to the complex.

[0386] Furthermore, the invention is directed to a method for screening for a molecule that modulates directly or indirectly the function, activity, composition or formation of the complex of any one of claims 1 to 7 comprising the steps of:
[0387] (a) exposing said complex, or a cell or organism containing said complex to one or more candidate molecules; and
[0388] (b) determining the amount of, activity of, protein components of, and/or intracellular localization of, said complex.

[0389] Preferably, this method of the invention further comprises the step of determining whether said candidate molecule modulates gamma secretase and/or beta-secretase modulator activity.

[0390] Preferably, the amount of said complex is determined.

[0391] In another preferred embodiment, the activity of said complex is determined, wherein preferably said determining step comprises isolating from the cell or organism said complex to produce said isolated complex and contacting said isolated complex in the presence or absence of a candidate molecule with a substrate of said complex and determining whether said substrate is processed in the absence of the candidate molecule and whether the processing of said substrate is modified in the presence of said candidate molecule.

[0392] In a preferred embodiment, the substrate is APP and the cleavage of APP is analyzed.

[0393] In a further preferred embodiment, the amount of the individual protein components of said complex is determined.

[0394] Preferably, said said determining step comprises determining whether any of the proteins of the respective complex as defined above is present in the complex.

[0395] In a further preferred embodiment, said method is a method of screening for a drug for treatment or prevention of neurodegenerative disease such as Alzheimer's disease.

[0396] The invention further relates to the use of a molecule that modulates the amount of, activity of, or the protein components of the complex of the invention for the manufacture of a medicament for the treatment or prevention of a neurodegenerative disease such as Alzheimer's disease. Preferably, the modulating molecule is a PADS2 interacting molecule, preferably a FADS2 inhibitor as defined above in the other use of the invention.

[0397] The invention further relates to a method for the production of a pharmaceutical composition comprising carrying out the method as defined above and further comprising mixing the identified molecule with a pharmaceutically acceptable carrier.

[0398] The invention further relates to a method for diagnosing or screening for the presence of a disease or disorder or a predisposition for developing a disease or disorder in a subject, which disease or disorder is characterized by an aberrant amount of, component disposition of, or intracellular localization of the complex of the invention, comprising determining the amount of, activity of, protein components of, and/or intracellular localization of, said complex.

[0399] Preferably, the activity of gamma secretase and/or beta-secretase modulator is determined or the amount of said complex is determined.

[0400] In a further preferred embodiment, the activity of said complex is determined.

[0401] Preferably, said determining step comprises isolating from the cell or organism said complex to produce said isolated complex and contacting said isolated complex in the presence or absence of a candidate molecule with a substrate of said complex and determining whether said substrate is processed in the absence of the candidate molecule and whether the processing of said substrate is modified in the presence of said candidate molecule.

[0402] Preferably the amount of the individual protein components of said complex are determined, wherein said determining step comprises determining whether any of the proteins of the complexes as defined above is present in the complex.

[0403] The invention further relates to the complex of the invention, for use in a method of diagnosing a disease or disorder, preferentially of a disease or disorder such as neurodegenerative disease such as Alzheimer's disease and related neurodegenerative disorders.

[0404] Furthermore, the invention relates to a method for treating or preventing a disease or disorder characterized by an aberrant amount of, activity of, component composition of or intracellular localization of, the complex of the invention, comprising administering to a subject in need of such treatment or prevention a therapeutically effective amount of one or more molecules that modulate the amount of, activity or, or protein components of, said complex.

[0405] Preferably, the mdulating molecule is a FADS2 interacting molecule, preferably a FADS2-inhibitor as defined above.

[0406] Preferably, said disease or disorder involves decreased levels of the amount or activity of said complex.

[0407] In a further preferred embodiment, said disease or disorder involves increased levels of the amount or activity of said complex.

[0408] The invention further relates to the complex of the invention as a target for an active agent of a pharmaceutical, preferably a drug target in the treatment or prevention of a disease or disorder, preferentially of a disease or disorder such as neurodegenerative disease such as Alzheimer's disease and related neurodegenerative disorders.

[0409] With respect to the complex of the invention and related methods and uses as defined above the follwing definitions and explanations apply:

Presenilins:

[0410] Presenilins 1 and 2 (Psen1 and Psen2, also referred to as PS1 and PS2 respectively) are integral membrane proteins which are localised in the endoplasmic reticulum, the Golgi and also at the cell surface (Kovacs, Nat Med 2. 224). They are predominantly found as a heterodimers of the NTF and CTF endoproteolytic fragments. The protease that cleaves presenilins (the “presenilinase”) is not known, it is likely that the process is autocatalytic, also the functional significance of PS (auto)proteolysis is unclear. Presenilins are involved in the proteolytical processing of Amyloid precursor protein (APP) (De Strooper et al, Nature 391, 387) and the Notch receptor (De Strooper et al, Nature 398, 518). In addition, Presenilins are associated with the cell-adhesion proteins alpha and beta-catenin, N-cadherin, and E-cadherin (Georgakopoulos et al, Mol Cell 4, 893) and other members of the armadillo family (Yu et al, J Biol Chem 273, 16470). APP processing by Presenilins is through their effects on gamma-secretase which cleaves APP, generating the C-terminus of the A-beta peptide. PS1 associates with the C83 and C99 processed C-terminal fragments of APP (Xia et al, Proc Natl Acad Sci USA, 94, 8208), Nicastrin (Yu et al, Nature 407, 48) and Pen-2 (Francis et al, Dev Cell 3, 85). Aph-1 (Francis et al, Dev Cell 3, 85) is required in Presenilin processing. It is not clear whether Presenilins regulate gamma-secretase activity directly or whether they are protease enzymes themselves (Kopan and Gouate, Genes Dev 14, 2799). The gamma secretase activity could comprise a multimeric complex of these proteins (Yu et al, Nature 407, 48) but it is not known how the relationship between these proteins affects secretase activity.

[0411] Familial Alzheimer's disease (FAD) patients carry mutations in the presenilin proteins (PS1; PS2) or in APP. These mutations result in increased production of A-beta42 (Li and Sudhof, J. Biol. CHem 279, 10542) which is the main component of cerebral plaques in PAD (Vassar, Adv Drug Deliv Rev 54, 1589).

[0412] Understanding the composition of the gamma-secretase complex, the relationship between its component parts and its regulation are important in the design of drugs for use in Alzheimer's disease patients.

Nicastrin

[0413] Nicastrin is a type 1 trans-membrane glycoprotein with a conserved transmembrane domain and DYIGS motif (Yu et al, Nature 407, 48) which is constitutively expressed in neural cell lines (Satoh and Kuroda, Neuropathology 21, 115). Biochemical studies have shown that Nicastrin binds to Presenilins 1 and 2, C-terminal derivatives of APP (Yu et al, Nature 407, 48), membrane-tethered forms of Notch (Chen et al, Nat Cell Biol 3, 751) and that it is a member of the gamma-secretase complex along with PS1 and PS2. It has been shown that Nicastrin is required for the intra-membrane cleavage of Notch (Lopez-Schier and St Johnston, Dev Cell 2, 79) and APP (Chung and Struhl, Nat Cell Biol 3, 1129), it may also have a role in post-translational stabilisation of Presenilin (Hu et al, Dev Cell 2, 69).

[0414] Aph-1 and Pen-2 were cloned recently in a screen for presenilin enhancers (“pen”) in C. elegans and shown to interact genetically with Aph-2 (Nicastrin). Defects in Aph-1 affect Notch signalling and Nicastrin localization. Aph-1 and Pen-2 are required for Notch cleavage, gamma-secretase activity and the accumulation of processed Presenilins. Francis et al. cloned the putative human orthologues of these genes, Aph-1a, Aph-1b and Pen-2, and recently Lee et al. also cloned the human Aph-1 cDNAs.

[0415] The exact components of the gamma-secretase complex are not known but these two novel proteins could be components of or accessory factors to the complex and may interact together directly with Presenilin or with a Presenilin/Nicastrin complex. Nicastrin is therefore a member of the active gamma-secretase complex and there is recent evidence that it is the fully glycosylated form of the protein which is important in this complex.

BACE1 (Beta-Secretase)

[0416] Vassar et al. (Science 286, 735) cloned a transmembrane aspartic protease that had the characteristics of the postulated beta-secretase of APP. Three other groups also cloned BACE1 using different approaches. BACE1 knockout mice have a normal phenotype, suggesting that therapeutic inhibition of BACE1 for AD may be free of mechanism-based toxicity. BACE1 −/− mice who are also homozygous for an amyloid precursor protein transgene lack brain beta-amyloid and beta-secretase-cleaved APP C-terminal fragments. Brain and primary cortical cultures from BACE1 knockout mice showed no detectable beta-secretase activity, and primary cortical cultures from BACE knockout mice produced much less amyloid-beta from APP. This suggests that BACE1, rather than its paralogue BACE2, is the main beta-secretase for APP.

[0417] BACE1 is a protein of 501 amino acids containing a 21-aa signal peptide followed by a proprotein domain spanning aa 22 to 45. There are alternatively spliced forms, BACE-1-457 and BACE-1-476. The lumenal domain of the mature protein is followed by one predicted transmembrane domain and a short cytosolic C-terminal tail of 24 aa. BACE1 is predicted to be a type 1 transmembrane protein with the active site on the lumenal side of the membrane, where beta-secretase cleaves APP and possible other yet unidentified substrates. BACE1 mRNA in rat brain is present at higher levels in neurons than in glia, supporting that neurons are the primary source of the extracellular A-beta deposited in plaques. Sequence and mass spectrometry analyses showed that asn153, asn172, asn223, and asn354 of the BACE1 ectodomain are N-glycosylation sites. In addition, the ectodomain contains 6 cys residues that form disulfide bridges between positions 216 and 420, 278 and 443, and 330 and 380. The C-terminal domain of BACE1 contains a dileucine motif (LL499/500) that can potentially regulate its trafficking and endocytosis, and an adjacent serine, which is a casein kinase 1 phosphorylation site (S498). The propeptide is predominantly cleaved from BACE1 by furin. In cells expressing wit or Swedish mutant APP, transient overexpression of BACE1 decreased alpha-secretase cleavage and increased beta-secretase activity at the known beta-secretase positions, asp1 and glu11. Although BACE1 is clearly a key enzyme required for the processing of APP into Ab, other potential substrates and functions of BACE1 are unknown. Also, no BACE1 interacting proteins with regulatory or modulatory functions have been described. Proteins that activate BACE1 activity would form suitable intervention points for Alzheimer's disease therapy. In addition, proteins that inhibit BACE1, like substrates or pseudosubstrates, could also provide suitable means of intervention e.g. as proteins therapeutics.

Protein Tyrosine Kinase 7 (PTK7)

[0418] PTK7, also referred to as colon carcinoma kinase 4 (CCK4), is an immunoglobulin superfamily transmembrane glycoprotein related to chicken KLG and D. melanogaster off-track. The gene has been mapped to human chromosome 6p21.1-->p12.2 by fluorescence in situ hybridization (Banga et al., 1997, Cytogenet Cell Genet. 1997; 76(1-2):43-4).

[0419] PTK7, several splicing variants of which exist in human tissues, differs from the receptor tyrosine kinase consensus sequence in several positions, suggesting that the protein be catalytically inactive (Mossie et al., 1995, Oncogene. 1995 Nov. 16; 11(10):2179-84.).

[0420] PTK7 is expressed in multiple human tissues, but its function is unknown. However, its similarity to the D. melanogaster transmembrane protein Off-track/Dtrk, which serves as a coreceptor of plexin A for semaphorins Sema 1A (Winberg et al., Neuron. 2001 Oct. 11; 32(1):53-62) and Sema 6D (Toyofuku et al., Genes Dev. 2004 Feb. 15; 18(4):435-47.), suggests that PTK7 might act as a coreceptor of a plexin-like protein. In the CNS, PTK7 might therefore play a role in maintenance of neuronal connectivity.

[0421] Said object is further achieved by the characterization of component proteins. These proteins are listed in table 2.

[0422] Furthermore, using functional assays, novel targets enabling novel therapies for the treatment of Alzheimer's disease were identified, namely FADS2, DEGS, SCD4

[0423] Fatty acid Δ6 desaturase (FADS2) has been known to catalyze the rate-limiting step in the biosynthesis of polyunsaturated fatty acids (PUFA), the conversion of either linoleic acid (C18:2) into γ-linolenic acid (gLA; C18:3n-6) in the n-6 metabolic pathway or of α-linolenic acid (aLA); C18:3n-3) into stearidonic acid (C18:4n-3) in the n-3 metabolic pathway. gLA is subsequently elongated and converted to arachidonic acid (AA; C20:4n-6) by fatty acid Δ5 desaturase (FADS1). AA is the essential precursor of various eicosanoids, such as prostaglandins and leukotrienes. In the n-3 metabolic pathway, FADS1 generates eicosapentaenoic acid (EPA; C20:5n-3), a PUPA that has been suggested to have neuroprotective effects (Lynch et al., 2003) and to be beneficial in the treatment of schizophrenia and depression (Emsley et al., 2003).

[0424] Another elongation step converts EPA into docosapentaenoic acid (DPA; C22:5n-3) and further to C24:5n-3. This PUFA and the analogous n-6 fatty acid, C24:4n-6. are additional substrates of FADS2, which converts them into C24:6n-3 and C24:5n-6, respectively. Both C24 PUFAs are partially oxidized in peroxisomes to give rise to docosahexaenoic acid (DHA; C22:6n-3), a major brain PUFA, and C22:5n-6, respectively.

[0425] Three human FADS family members have been cloned (see also for rodents (Cho et al (1999), J Biol Chem 274, 37335-37339; Marquardt, A (2000) Genomics 66, 175). All are fusion products composed of an N-terminal cytochrome b5-like domain and a C-terminal multiple membrane-spanning desaturase portion, both characterized by conserved His-motifs. FADS genes are clustered at 11q12-q13.1; likely arisen from gene duplication. The funtion of a related gene product, FADS3, is unknown, but given the high level of sequence similarity between FADS2 and FADS3 it has been proposed that FADS3 may constitute an alternative fatty acid Δ6 desaturase.

[0426] According to the functional assays provided herein, Δ5 desaturase (FADS1) does not have an effect on the metabolization of APP.

[0427] Thus FADS1 (SEQ ID 122) and the orthologs thereeof are excluded from the scope of the invention. Those sequences are thus excluded from the general definition of homologs provided herein.

[0428] FADS3 (SEQ ID 125), or a functionally active derivative thereof, or a functionally active fragment thereof, or a homologue thereof, or a variant of said protein encoded by a nucleic acid that hybridizes to the nucleic acid encoding said protein under low stringency conditions; wherein said low stringency conditions comprise hybridization in a buffer comprising 35% formamide, 5×SSC, 50 mM Tris-HCl (pH 7.5), 5 mM EDTA, 0.02% PVP, 0.02% BSA, 100 ug/ml denatured salmon sperm DNA, and 10% (wt/vol) dextran sulfate for 18-20 hours at 40° C., washing in a buffer consisting of 2×SSC, 25 mM Tris-HCl (pH 7.4), 5 mM EDTA, and 0.1% SDS for 1-5 hours at 55° C., and washing in a buffer consisting of 2×SSC, 25 mM Tris-HCl (pH 7.4) 5 mM EDTA, and 0.1% SDS for 1.5 hours at 60° C. as a screening tool for compounds for the treatment of Alzheimer's disease and/or for the modification of the gamma-secretase activity is explicitely included within the scope of the invention as a screening tool for compounds for the treatment of Alzheimer's disease and/or the modulation of gamma-secretase-activity and/or beta-secretase activity.

[0429] In particular, the invention relates to FADS2 or a functionally active derivative thereof, or a functionally active fragment thereof, or a homologue thereof, or a variant of said protein encoded by a nucleic acid that hybridizes to the nucleic acid encoding said protein under low stringency conditions;

[0430] wherein said low stringency conditions comprise hybridization in a buffer comprising 35% formamide, 5×SSC, 50 mM Tris-HCl (pH 7.5), 5 mM EDTA, 0.02% PVP, 0.02% BSA, 100 ug/ml denatured salmon sperm DNA, and 10% (wt/vol) dextran sulfate for 18-20 hours at 40° C., washing in a buffer consisting of 2×SSC, 25 mM Tris-HCl (pH 7.4), 5 mM EDTA, and 0.1% SDS for 1-5 hours at 55° C., and washing in a buffer consisting of 2×SSC, 25 mM Tris-HCl (pH 7.4) 5 mM EDTA, and 0.1% SDS for 1.5 hours at 60° C. as a screening tool for compounds for the treatment of Alzheimer's disease and/or for the modification of the gamma-secretase activity and/or beta-secretase activity, with the provisio that FADS1 (SEQ 122) is excluded.

[0431] Furthermore, the invention relates to DEGS (SEQ ID 123) and SCD4 (SEQ ID 123) or a functionally active derivative thereof, or a functionally active fragment thereof, or a homologue thereof, or a variant of said protein encoded by a nucleic acid that hybridizes to the nucleic acid encoding said protein under low stringency conditions;

[0432] wherein said low stringency conditions comprise hybridization in a buffer comprising 35% formamide, 5×SSC, 50 mM Tris-HCl (pH 7.5), 5 mM EDTA, 0.02% PVP, 0.02% BSA, 100 ug/ml denatured salmon sperm DNA, and 10% (wt/vol) dextran sulfate for 18-20 hours at 40° C., washing in a buffer consisting of 2×SSC, 25 mM Tris-HCl (pH 7.4), 5 mM EDTA, and 0.1% SDS for 1-5 hours at 55° C., and washing in a buffer consisting of 2×SSC, 25 mM Tris-HCl (pH 7.4) 5 mM EDTA, and 0.1% SDS for 1.5 hours at 60° C. as a screening tool for compounds for the treatment of Alzheimer's disease and/or for the modification of the gamma-secretase activity and/or beta-secretase activity.

3.1 Definitions

[0433] The term “activity” as used herein, refers to the function of a molecule in its broadest sense. It generally includes, but is not limited to, biological, biochemical, physical or chemical functions of the molecule. It includes for example the enzymatic activity, the ability to interact with other molecules and ability to activate, facilitate, stabilize, inhibit, suppress or destabilize the function of other molecules, stability, ability to localize to certain subcellular locations. Where applicable, said term also relates to the function of a protein complex in its broadest sense.

[0434] The term “agonist” as used herein, means a molecule which modulates the formation of a protein complex or which, when bound to a complex or protein of the invention or a molecule in the protein complex, increases the amount of, or prolongs the duration of, the activity of the complex. The stimulation may be direct or indirect, including effects on the expression of a gene encoding a member of the protein complex, or by a competitive or non-competitive mechanism. Agonists may include proteins, nucleic acids, carbohydrates or any other organic or anorganic molecule or metals. Agonists also include a functional peptide or peptide fragment derived from a protein member of the complexes of the invention or a protein member itself of the complexes of the invention. Preferred activators are those which, when added to the complex and/or the protein of the invention under physiological conditions and/or in vitro assays, including diagnostic or prognostic assays, result in a change of the level of any of the activities of the protein complex and/or the proteins of the invention as exemplary illustrated above by at least 10%, at least 25%, at least 50%, at least 100%, at least, 200%, at least 500% or at least 1000% at a concentration of the activator 1 μg ml⁻¹, 10 μg ml⁻¹, 100 μg ml⁻¹, 500 μg ml⁻¹, 1 mg ml⁻¹, 10 mg ml⁻¹ or 100 mg ml⁻¹. Any combination of the above mentioned degrees of percentages and concentration may be used to define an agonist of the invention, with greater effect at lower concentrations being preferred.

[0435] The term “amount” as used herein and as applicable to the embodiment described relates to the amount of the particular protein or protein complex described, including the value of null, i.e. where no protein or protein complex described in that particular embodiment is present under the or any of the conditions which might be specified in that particular embodiment.

[0436] The term “animal” as used herein includes, but is not limited to mammals, preferably mammals such as cows, pigs, horses, mice, rats, cats, dogs, sheep, goats and most preferably humans. Other animals used in agriculture, such as chickens, ducks etc. are also included in the definition as used herein.

[0437] The term “animal” as used herein does not include humans if being used in the context of genetic alterations to the germline.

[0438] The term “antagonist” as used herein, means a molecule which modulates the formation of a protein complex or which, when bound to a complex or protein of the invention or a molecule in the protein complex, decreases the amount of, or the duration or level of activity of the complex. The effect may be direct or indirect, including effects on the expression of a gene encoding a member of the protein complex, or by a competitive or non-competitive mechanism. Antagonists may include proteins, including antibodies, nucleic acids, carbohydrates or any other organic or anorganic molecule or metals. Antagonists also include a functional peptide or peptide fragment derived from a protein member of the complexes of the invention or a protein member itself of the complexes of the invention. Preferred antagonists are those which, when added to the complex and/or the protein of the invention under physiological conditions and/or in vitro assays, including diagnostic or prognostic assays, result in a change of the level of any of the activities of the protein complex and/or the proteins of the invention as exemplary illustrated above by at least 10%, at least 20%, at least 30%, at least 40% at least 50%, at least 60%, at least 70%, at least 80%, at least 90%, at least 95% or at least 99% at a concentration of the inhibitor of 1 μg ml⁻¹, 10 μg ml⁻¹, 100 μg ml⁻¹, 500 μg ml⁻¹, 1 mg ml⁻¹, 10 mg ml⁻¹ or 100 mg ml⁻¹.

[0439] Any combination of the above mentioned degrees of percentages and concentration may be used to define antagonist of the invention, with greater effect at lower concentrations being preferred.

[0440] The term “antibodies” as used herein, include include, but are not limited to, polyclonal, monoclonal, chimeric, single chain, Fab fragments, and an Fab expression library.

[0441] The term “binding” as used herein means a stable or transient association between two molecules, including electrostatic, hydrophobic, ionic and/or hydrogen-bond interaction under physiological conditions and/or conditions being used in diagnostic or prognostic method or process or procedure.

[0442] The term “carrier” as used herein refers to a diluent, adjuvant, excipient, or vehicle with which the therapeutic is administered. Such pharmaceutical carriers can be sterile liquids, such as water and oils, including those of petroleum, animal, vegetable or synthetic origin, including but not limited to peanut oil, soybean oil, mineral oil, sesame oil and the like. Water is a preferred carrier when the pharmaceutical composition is administered orally. Saline and aqueous dextrose are preferred carriers when the pharmaceutical composition is administered intravenously. Saline solutions and aqueous dextrose and glycerol solutions are preferably employed as liquid carriers for injectable solutions. Suitable pharmaceutical excipients include starch, glucose, lactose, sucrose, gelatin, malt, rice, flour, chalk, silica gel, sodium stearate, glycerol monostearate, talc, sodium chloride, dried skim milk, glycerol, propylene, glycol, water, ethanol and the like. The composition, if desired, can also contain minor amounts of wetting or emulsifying agents, or pH buffering agents. These compositions can take the form of solutions, suspensions, emulsions, tablets, pills, capsules, powders, sustained-release formulations and the like. The composition can be formulated as a suppository, with traditional binders and carriers such as triglycerides. Oral formulation can include standard carriers such as pharmaceutical grades of mannitol, lactose, starch, magnesium stearate, sodium saccharine, cellulose, magnesium carbonate, etc. Examples of suitable pharmaceutical carriers are described in “Remington's Pharmaceutical Sciences” by E. W. Martin. Such compositions will contain a therapeutically effective amount of the therapeutic, preferably in purified form, together with a suitable amount of carrier so as to provide the form for proper administration to the patient. The formulation should suit the mode of administration.

[0443] If not stated otherwise, the terms “complex” and “protein complex” are used interchangeably herein and refer to a complex of proteins that is able to perform one or more functions of the wild type protein complex. The protein complex may or may not include and/or be associated with other molecules such as nucleic acid, such as RNA or DNA, or lipids or further cofactors or moieties selected from a metal ions, hormones, second messengers, phosphate, sugars.

[0444] A “complex” of the invention may also be part of or a unit of a larger physiological protein assembly.

[0445] If not stated otherwise, the term “compound” as used herein are include but are not limited to peptides, nucleic acids, carbohydrates, natural product extract librariesorganic molecules, preferentially small organic molecules, anorganic molecules, including but not limited to chemicals, metals and organometallic molecules.

[0446] The terms “derivatives” or “analogs of component proteins” or “variants” as used herein include, but are not limited, to molecules comprising regions that are substantially homologous to the component proteins, in various embodiments, by at least 30%, 40%, 50%, 60%, 70%, 80%, 90%, 95% or 99% identity over an amino acid sequence of identical size or when compared to an aligned sequence in which the alignment is done by a computer homology program known in the art, or whose encoding nucleic acid is capable of hybridizing to a sequence encoding the component protein under stringent, moderately stringent, or nonstringent conditions. It means a protein which is the outcome of a modification of the naturally occurring protein, by amino acid substitutions, deletions and additios, respectively, which derivatives still exhibit the biological function of the naturally occurring protein although not necessarily to the same degree. The biological function of such proteins can e.g. be examined by suitable available in vitro assays as provided in the invention.

[0447] The term “functionally active” as used herein refers to a polypeptide, namely a fragment or derivative, having structural, regulatory, or biochemical functions of the protein according to the embodiment of which this polypeptide, namely fragment or derivative is related to.

[0448] The term “fragment” as used herein refers to a polypeptide of at least 10, 20, 30, 40 or 50 amino acids of the component protein according to the embodiment. In specific embodiments, such fragments are not larger than 35, 100 or 200 amino acids.

[0449] The term “gene” as used herein refers to a nucleic acid comprising an open reading frame encoding a polypeptide of, if not stated otherwise, the present invention, including both exon and optionally intron sequences.

[0450] The terms “homologue” or “homologous gene products” as used herein mean a protein in another species, preferably mammals, which performs the same biological function as the a protein component of the complex further described herein. Such homologues are also termed “orthologous gene products”. The algorithm for the detection of orthologue gene pairs from humans and mammalians or other species uses the whole genome of these organisms. First, pairwise best hits are retrieved, using a full Smith-Waterman alignment of predicted proteins. To further improve reliability, these pairs are clustered with pairwise best hits involving Drosophila melanogaster and C. elegans proteins. Such analysis is given, e.g., in Nature, 2001, 409:860-921. The homologues of the proteins according to the invention can either be isolated based on the sequence homology of the genes encoding the proteins provided herein to the genes of other species by cloning the respective gene applying conventional technology and expressing the protein from such gene, or by isolating proteins of the other species by isolating the analogous complex according to the methods provided herein or to other suitable methods commonly known in the art.

[0451] The term “host cells” or, were applicable, “cells” or “hosts” as used herein is intended to be understood in a broadest sense and include, but are not limited to mammalian cell systems infected with virus (e.g., vaccinia virus, adenovirus, etc.); insect cell systems infected with virus (e.g., baculovirus); microorganisms such as yeast containing yeast vectors; or bacteria transformed with bacteriophage, DNA, plasmid DNA, or cosmid DNA. The expression elements of vectors vary in their strengths and specificities. Depending on the host-vector system utilized, any one of a number of suitable transcription and translation elements may be used.

[0452] It is understood that this term not only refers to the particular subject cell but to the progeny or potential progeny of such a cell. Because certain modifications may occur in succeeding generations due to either mutation of environmental influences, such progeny may not, in fact, be identical to the parent cell, but are still included within the scope of the term as used herein.

[0453] The term “nuleic acid” as used herein refers to polynucleotides such as deoxyribonucleic acid (DNA), and, where appropriate, ribonucleic acid (RNA). They may also be polynucleotides which include within them synthetic or modified nucleotides. A number of different types of modification to polynucleotides are known in the art. These include methylphosphonate and phosphorothioate backbones, addition of acridine or polylysine chains at the 3′ and/or 5′ ends of the molecule. For the purposes of the present invention, it is to be understood that the polynucleotides described herein may be modified by any method available in the art. Such modifications may be carried out in order to enhance the in vivo activity or lifespan of polynucleotides of the invention. Polynucleotides according to the invention may be produced recombinantly, synthetically, or by any means available to those of skill in the art. They may also be cloned by standard techniques. The polynucleotides are typically provided in isolated and/or purified form. As applicable to the embodiment being described, they include both single stranded and double-stranded polynucleotides.

[0454] The term “percent identity”, as used herein, means the number of identical residues as defined by an optimal alignment using the Smith-Waterman algorithm divided by the length of the overlap multiplied by 100. The alignment is performed by the search program (Pearson, 1991, Genomics 11:635-650) with the constraint to align the maximum of both sequences.

[0455] The terms “polypeptides” and “proteins” are, where applicable, used interchangeably herein. They may be chemically modified, e.g. post-translationally modified. For example, they may be glycosylated or comprise modified amino acid residues. They may also be modified by the addition of a signal sequence to promote their secretion from a cell where the polypeptide does not naturally contain such a sequence. They may be tagged with a tag. They may be tagged with different labels which may assists in identification of the proteins in a protein complex. Polypeptides/proteins for use in the invention may be in a substantially isolated form. It will be understood that the polypeptid/protein may be mixed with carriers or diluents which will not interfere with the intended purpose of the polypeptide and still be regarded as substantially isolated. A polypeptide/protein for use in the invention may also be in a substantially purified form, in which case it will generally comprise the polypeptide in a preparation in which more than 50%, e.g. more than 80%, 90%, 95% or 99%, by weight of the polypeptide in the preparation is a polypeptide of the invention.

[0456] “Target for therapeutic drug” means that the respective protein (target) can bind the active ingredient of a pharmaceutical composition and thereby changes its biological activity in response to the drug binding.

[0457] The term “tag” as used herein is meant to be understood in its broadest sense and to include, but is not limited to any suitable enzymatic, fluorescent, or radioactive labels and suitable epitopes, incuding but not limited to HA-tag, Myc-tag, T17, His-tag, FLAG-tag, Calmodulin binding proteins, glutathione-S-transferase, strep-tag, KT3-epitope, EEF-epitpopes, green-fluorescent protein and variants thereof.

[0458] The term “therapeutics” as used herein, includes, but is not limited to, a protein complex of the present invention, the individual component proteins, and analogs and derivatives (including fragments); antibodies thereto; nucleic acids encoding the component protein, and analogs or derivatives thereof; component protein antisense nucleic acids, and agents that modulate complex formation and/or activity (i.e., agonists and antagonists).

[0459] The term “vector” as used herein means a nucleic acid molecule capable of transporting another nucleic acid sequence to which it has been linked. Preferred vectors are those capable of autonomous replication and/or expression of nueclic acids to which they linked. The terms “plasmid” and “vector” are used interchangeably herein when applicable to the embodiment. However, vectors other than plasmids are also included herein. The expression elements of vectors vary in their strengths and specificities. Depending on the host-vector system utilized, any one of a number of suitable transcription and translation elements may be used.

[0460] An object of the present invention was to identify protein complexes of the beta-amyloid precursor protein (APP) processing pathway, component proteins of the said complexes, fragments and derivatives of the component proteins, and antibodies specific to the complexes.

[0461] Furthermore, it was an object to provide novel protein targets for the screening/development of novel therapies for the treatment of Alzheimer's disease

[0462] The present invention relates to the protein complexes including the protein FADS2, component proteins thereof. The present invention also relates to methods for use of said complexes and in particular the use of FADS2 and also the proteins DEGS and SCD4 in, inter alia, screening, diagnosis and therapy.

[0463] By applying the process according to the invention said protein complex were identified. The components are listed in table 1.

[0464] Said object is further achieved by the characterisation of component proteins. These proteins are listed in table 2.

[0465] Furthermore, the invention relates to DEGS (SEQ ID 123) and SCD4 (SEQ ID 123) or a functionally active derivative thereof, or a functionally active fragment thereof, or a homologue thereof, or a variant of said protein encoded by a nucleic acid that hybridizes to the nucleic acid encoding said protein under low stringency conditions;

[0466] wherein said low stringency conditions comprise hybridization in a buffer comprising 35% formamide, 5×SSC, 50 mM Tris-HCl (pH 7.5), 5 mM EDTA, 0.02% PVP, 0.02% BSA, 100 ug/ml denatured salmon sperm DNA, and 10% (wt/vol) dextran sulfate for 18-20 hours at 40° C., washing in a buffer consisting of 2×SSC, 25 mM Tris-HCl (pH 7.4), 5 mM EDTA, and 0.1% SDS for 1-5 hours at 55° C., and washing in a buffer consisting of 2×SSC, 25 mM Tris-HCl (pH 7.4) 5 mM EDTA, and 0.1% SDS for 1.5 hours at 60° C. as a screening tool for compounds for the treatment of Alzheimer's disease and/or for the modification of the gamma-secretase activity and/or beta-secretase activity.

[0467] Animal models are also provided herein.

[0468] Preferably, the protein components of the complexes described herein are all mammalian proteins. The complexes can also consist only of the respective homologues from other mammals such as mouse, rat, pig, cow, dog, monkey, sheep or horse or other species such as D. melanogaster, C. elegans or chicken. In another preferred embodiment, the complexes are a mixture of proteins from two or more species.

Protein Complexes/Proteins of the Invention

[0469] The protein complexes of the present invention and their component proteins are described in the Tables 1-3. The protein complexes and component proteins can be obtained by methods well known in the art for protein purification and recombinant protein expression. For example, the protein complexes of the present invention can be isolated using the TAP method described in the Example-section, infra, and in WO 00/09716 and Rigaut et al., 1999, Nature Biotechnol. 17:1030-1032, which are each incorporated by reference in their entirety. Additionally, the protein complexes can be isolated by immunoprecipitation of the component proteins and combining the immunoprecipitated proteins. The protein complexes can also be produced by recombinantly expressing the component proteins and combining the expressed proteins.

[0470] The nucleic and amino acid sequences of the component proteins of the protein complexes of the present invention are provided herein (SEQ ID NO 1-121))(see. Furthermore sequences of the proteins DEGS and SCD4 are provided herein (SEQ ID 123 and 124 respectively), and can be obtained by any method known in the art, e.g., by PCR amplification using synthetic primers hybridizable to the 3′ and 5′ ends of each sequence, and/or by cloning from a cDNA or genomic library using an oligonucleotide specific for each nucleotide sequence.

[0471] Homologues (e.g., nucleic acids encoding component proteins from other species) or other related sequences (e.g., variants, paralogs) which are members of a native cellular protein complex can be obtained by low, moderate or high stringency hybridization with all or a portion of the particular nucleic acid sequence as a probe, using methods well known in the art for nucleic acid hybridization and cloning.

[0472] Exemplary moderately stringent hybridization conditions are as follows: prehybridization of filters containing DNA is carried out for 8 hours to overnight at 65° C. in buffer composed of 6×SSC, 50 mM Tris-HCl (pH 7.5), 1 mM EDTA, 0.02% PVP, 0.02% Ficoll, 0.02% BSA, and 500 μg/ml denatured salmon sperm DNA. Filters are hybridized for 48 hours at 65° C. in prehybridization mixture containing 100 μg/ml denatured salmon sperm DNA and 5-20×10⁶ cpm of ³²P-labeled probe. Washing of filters is done at 37° C. for 1 hour in a solution containing 2×SSC, 0.01% PVP, 0.01% Ficoll, and 0.01% BSA. This is followed by a wash in 0.1×SSC at 50° C. for 45 min before autoradiography. Alternatively, exemplary conditions of high stringency are as follows: e.g., hybridization to filter-bound DNA in 0.5 M NaHPO₄, 7% sodium dodecyl sulfate (SDS), 1 mM EDTA at 65° C., and washing in 0.1×SSC/0.1% SDS at 68° C. (Ausubel et al., eds., 1989, Current Protocols in Molecular Biology, Vol. I, Green Publishing Associates, Inc., and John Wiley & sons, Inc., New York, at p. 2.10.3). Other conditions of high stringency which may be used are well known in the art. Exemplary low stringency hybridization conditions comprise hybridization in a buffer comprising 35% formamide, 5×SSC, 50 mM Tris-HCl (pH 7.5), 5 mM EDTA, 0.02% PVP, 0.02% Ficoll, 0.2% BSA, 100 μg/ml denatured salmon sperm DNA, and 10% (wt/vol) dextran sulfate for 18-20 hours at 40° C., washing in a buffer consisting of 2×SSC, 25 mM Tris-HCl (pH 7.4), 5 mM EDTA, and 0.1% SDS for 1.5 hours at 55° C., and washing in a buffer consisting of 2×SSC, 25 mM Tris-HCl (pH 7.4), 5 mM EDTA, and 0.1% SDS for 1.5 hours at 60° C.

[0473] For recombinant expression of one or more of the proteins, the nucleic acid containing all or a portion of the nucleotide sequence encoding the protein can be inserted into an appropriate expression vector, i.e., a vector that contains the necessary elements for the transcription and translation of the inserted protein coding sequence. The necessary transcriptional and translational signals can also be supplied by the native promoter of the component protein gene, and/or flanking regions.

[0474] A variety of host-vector systems may be utilized to express the protein coding sequence. These include but are not limited to mammalian cell systems infected with virus (e.g., vaccinia virus, adenovirus, etc.); insect cell systems infected with virus (e.g., baculovirus); microorganisms such as yeast containing yeast vectors; or bacteria transformed with bacteriophage, DNA, plasmid DNA, or cosmid DNA. The expression elements of vectors vary in their strengths and specificities. Depending on the host-vector system utilized, any one of a number of suitable transcription and translation elements may be used.

[0475] In a preferred embodiment, a complex of the present invention is obtained by expressing the entire coding sequences of the component proteins in the same cell, either under the control of the same promoter or separate promoters. In yet another embodiment, a derivative, fragment or homologue of a component protein is recombinantly expressed. Preferably the derivative, fragment or homologue of the protein forms a complex with the other components of the complex, and more preferably forms a complex that binds to an anti-complex antibody. Such an antibody is further described infra.

[0476] Any method available in the art can be used for the insertion of DNA fragments into a vector to construct expression vectors containing a chimeric gene consisting of appropriate transcriptional/translational control signals and protein coding sequences. These methods may include in vitro recombinant DNA and synthetic techniques and in vivo recombinant techniques (genetic recombination). Expression of nucleic acid sequences encoding a component protein, or a derivative, fragment or homologue thereof, may be regulated by a second nucleic acid sequence so that the gene or fragment thereof is expressed in a host transformed with the recombinant DNA molecule(s). For example, expression of the proteins may be controlled by any promoter/enhancer known in the art. In a specific embodiment, the promoter is not native to the gene for the component protein. Promoters that may be used can be selected from among the many known in the art, and are chosen so as to be operative in the selected host cell.

[0477] In a specific embodiment, a vector is used that comprises a promoter operably linked to nucleic acid sequences encoding a component protein, or a fragment, derivative or homologue thereof, one or more origins of replication, and optionally, one or more selectable markers (e.g., an antibiotic resistance gene).

[0478] In another specific embodiment, an expression vector containing the coding sequence, or a portion thereof, of a component protein, either together or separately, is made by subcloning the gene sequences into the EcoRI restriction site of each of the three pGEX vectors (glutathione S-transferase expression vectors; Smith and Johnson, 1988, Gene 7:31-40). This allows for the expression of products in the correct reading frame.

[0479] Expression vectors containing the sequences of interest can be identified by three general approaches: (a) nucleic acid hybridization, (b) presence or absence of “marker” gene function, and (c) expression of the inserted sequences. In the first approach, coding sequences can be detected by nucleic acid hybridization to probes comprising sequences homologous and complementary to the inserted sequences. In the second approach, the recombinant vector/host system can be identified and selected based upon the presence or absence of certain “marker” functions (e.g., resistance to antibiotics, occlusion body formation in baculovirus, etc.) caused by insertion of the sequences of interest in the vector. For example, if a component protein gene, or portion thereof, is inserted within the marker gene sequence of the vector, recombinants containing the encoded protein or portion will be identified by the absence of the marker gene function (e.g., loss of O-galactosidase activity). In the third approach, recombinant expression vectors can be identified by assaying for the component protein expressed by the recombinant vector. Such assays can be based, for example, on the physical or functional properties of the interacting species in in vitro assay systems, e.g., formation of a complex comprising the protein or binding to an anti-complex antibody.

[0480] Once recombinant component protein molecules are identified and the complexes or individual proteins isolated, several methods known in the art can be used to propagate them. Using a suitable host system and growth conditions, recombinant expression vectors can be propagated and amplified in quantity. As previously described, the expression vectors or derivatives which can be used include, but are not limited to, human or animal viruses such as vaccinia virus or adenovirus; insect viruses such as baculovirus, yeast vectors; bacteriophage vectors such as lambda phage; and plasmid and cosmid vectors.

[0481] In addition, a host cell strain may be chosen that modulates the expression of the inserted sequences, or modifies or processes the expressed proteins in the specific fashion desired. Expression from certain promoters can be elevated in the presence of certain inducers; thus expression of the genetically-engineered component proteins may be controlled. Furthermore, different host cells have characteristic and specific mechanisms for the translational and post-translational processing and modification (e.g., glycosylation, phosphorylation, etc.) of proteins. Appropriate cell lines or host systems can be chosen to ensure that the desired modification and processing of the foreign protein is achieved. For example, expression in a bacterial system can be used to produce an unglycosylated core protein, while expression in mammalian cells ensures “native” glycosylation of a heterologous protein. Furthermore, different vector/host expression systems may effect processing reactions to different extents.

[0482] In other specific embodiments, a component protein or a fragment, homologue or derivative thereof, may be expressed as fusion or chimeric protein product comprising the protein, fragment, homologue, or derivative joined via a peptide bond to a heterologous protein sequence of a different protein. Such chimeric products can be made by ligating the appropriate nucleic acid sequences encoding the desired amino acids to each other by methods known in the art, in the proper coding frame, and expressing the chimeric products in a suitable host by methods commonly known in the art. Alternatively, such a chimeric product can be made by protein synthetic techniques, e.g., by use of a peptide synthesizer. Chimeric genes comprising a portion of a component protein fused to any heterologous protein-encoding sequences may be constructed.

[0483] In particular, protein component derivatives can be made by altering their sequences by substitutions, additions or deletions that provide for functionally equivalent molecules. Due to the degeneracy of nucleotide coding sequences, other DNA sequences that encode substantially the same amino acid sequence as a component gene or cDNA can be used in the practice of the present invention. These include but are not limited to nucleotide sequences comprising all or portions of the component protein gene that are altered by the substitution of different codons that encode a functionally equivalent amino acid residue within the sequence, thus producing a silent change. Likewise, the derivatives of the invention include, but are not limited to, those containing, as a primary amino acid sequence, all or part of the amino acid sequence of a component protein, including altered sequences in which functionally equivalent amino acid residues are substituted for residues within the sequence resulting in a silent change. For example, one or more amino acid residues within the sequence can be substituted by another amino acid of a similar polarity that acts as a functional equivalent, resulting in a silent alteration. Substitutes for an amino acid within the sequence may be selected from other members of the class to which the amino acid belongs. For example, the nonpolar (hydrophobic) amino acids include alanine, leucine, isoleucine, valine, proline, phenylalanine, tryptophan and methionine. The polar neutral amino acids include glycine, serine, threonine, cysteine, tyrosine, asparagine, and glutamine. The positively charged (basic) amino acids include arginine, lysine and histidine. The negatively charged (acidic) amino acids include aspartic acid and glutamic acid.

[0484] In a specific embodiment, up to 1%, 2%, 5%, 10%, 15% or 20% of the total number of amino acids in the wild type protein are substituted or deleted; or 1, 2, 3, 4, 5, or 6 or up to 10 or up to 20 amino acids are inserted, substituted or deleted relative to the wild type protein.

[0485] In a specific embodiment of the invention, the nucleic acids encoding a protein component and protein components consisting of or comprising a fragment of or consisting of at least 6 (continuous) amino acids of the protein are provided. In other embodiments, the fragment consists of at least 10, 20, 30, 40, or 50 amino acids of the component protein. In specific embodiments, such fragments are not larger than 35, 100 or 200 amino acids. Derivatives or analogs of component proteins include, but are not limited, to molecules comprising regions that are substantially homologous to the component proteins, in various embodiments, by at least 30%, 40%, 50%, 60%, 70%, 80%, 90%, 95% or 99% identity over an amino acid sequence of identical size or when compared to an aligned sequence in which the alignment is done by a computer homology program known in the art, or whose encoding nucleic acid is capable of hybridizing to a sequence encoding the component protein under stringent, moderately stringent, or nonstringent conditions.

[0486] In a specific embodiment, proteins are provided herein, which share an identical region of 20, 30, 40, 50 or 60 contiguous amino acids of the proteins listed in table 2.

[0487] The protein component derivatives and analogs of the invention can be produced by various methods known in the art. The manipulations which result in their production can occur at the gene or protein level. For example, the cloned gene sequences can be modified by any of numerous strategies known in the art (Sambrook et al., 1989, Molecular Cloning, A Laboratory Manual, 2d Ed., Cold Spring Harbor Laboratory Press, Cold Spring Harbor, N.Y.). The sequences can be cleaved at appropriate sites with restriction endonuclease(s), followed by further enzymatic modification if desired, isolated, and ligated in vitro. In the production of the gene encoding a derivative, homologue or analog of a component protein, care should be taken to ensure that the modified gene retains the original translational reading frame, uninterrupted by translational stop signals, in the gene region where the desired activity is encoded.

[0488] Additionally, the encoding nucleic acid sequence can be mutated in vitro or in vivo, to create and/or destroy translation, initiation, and/or termination sequences, or to create variations in coding regions and/or form new restriction endonuclease sites or destroy pre-existing ones, to facilitate further in vitro modification. Any technique for mutagenesis known in the art can be used, including but not limited to, chemical mutagenesis and in vitro site-directed mutagenesis (Hutchinson et al., 1978, J. Biol. Chem. 253:6551-6558), amplification with PCR primers containing a mutation, etc.

[0489] Once a recombinant cell expressing a component protein, or fragment or derivative thereof, is identified, the individual gene product or complex can be isolated and analyzed. This is achieved by assays based on the physical and/or functional properties of the protein or complex, including, but not limited to, radioactive labeling of the product followed by analysis by gel electrophoresis, immunoassay, cross-linking to marker-labeled product, etc.

[0490] The component proteins and complexes may be isolated and purified by standard methods known in the art (either from natural sources or recombinant host cells expressing the complexes or proteins), including but not restricted to column chromatography (e.g., ion exchange, affinity, gel exclusion, reversed-phase high pressure, fast protein liquid, etc.), differential centrifugation, differential solubility, or by any other standard technique used for the purification of proteins. Functional properties may be evaluated using any suitable assay known in the art.

[0491] Alternatively, once a component protein or its derivative, is identified, the amino acid sequence of the protein can be deduced from the nucleic acid sequence of the chimeric gene from which it was encoded. As a result, the protein or its derivative can be synthesized by standard chemical methods known in the art (e.g., Hunkapiller et al., 1984, Nature 310:105-111).

[0492] Manipulations of component protein sequences may be made at the protein level. Included within the scope of the invention is a complex in which the component proteins or derivatives and analogs that are differentially modified during or after translation, e.g., by glycosylation, acetylation, phosphorylation, amidation, derivatization by known protecting/blocking groups, proteolytic cleavage, linkage to an antibody molecule or other cellular ligand, etc. Any of numerous chemical modifications may be carried out by known techniques, including but not limited to specific chemical cleavage by cyanogen bromide, trypsin, chymotrypsin, papain, V8 protease, NaBH₄, acetylation, formylation, oxidation, reduction, metabolic synthesis in the presence of tunicamycin, etc.

[0493] In specific embodiments, the amino acid sequences are modified to include a fluorescent label. In another specific embodiment, the protein sequences are modified to have a heterofunctional reagent; such heterofunctional reagents can be used to crosslink the members of the complex.

[0494] In addition, complexes of analogs and derivatives of component proteins can be chemically synthesized. For example, a peptide corresponding to a portion of a component protein, which comprises the desired domain or mediates the desired activity in vitro (e.g., complex formation) can be synthesized by use of a peptide synthesizer. Furthermore, if desired, non-classical amino acids or chemical amino acid analogs can be introduced as a substitution or addition into the protein sequence.

[0495] In cases where natural products are suspected of being mutant or are isolated from new species, the amino acid sequence of a component protein isolated from the natural source, as well as those expressed in vitro, or from synthesized expression vectors in vivo or in vitro, can be determined from analysis of the DNA sequence, or alternatively, by direct sequencing of the isolated protein. Such analysis can be performed by manual sequencing or through use of an automated amino acid sequenator.

[0496] The complexes can also be analyzed by hydrophilicity analysis (Hopp and Woods, 1981, Proc. Natl. Acad. Sci. USA 78:3824-3828). A hydrophilicity profile can be used to identify the hydrophobic and hydrophilic regions of the proteins, and help predict their orientation in designing substrates for experimental manipulation, such as in binding experiments, antibody synthesis, etc. Secondary structural analysis can also be done to identify regions of the component proteins, or their derivatives, that assume specific structures (Chou and Fasman, 1974, Biochemistry 13:222-23). Manipulation, translation, secondary structure prediction, hydrophilicity and hydrophobicity profile predictions, open reading frame prediction and plotting, and determination of sequence homologies, etc., can be accomplished using computer software programs available in the art.

[0497] Other methods of structural analysis including but not limited to X-ray crystallography (Engstrom, 1974, Biochem. Exp. Biol. 11:7-13), mass spectroscopy and gas chromatography (Methods in Protein Science, J. Wiley and Sons, New York, 1997), and computer modeling (Fletterick and Zoller, eds., 1986, Computer Graphics and Molecular Modeling, In: Current Communications in Molecular Biology, Cold Spring Harbor Laboratory, Cold Spring Harbor Press, New York) can also be employed.

Antibodies to Protein Complexes/Proteins of the Invention

[0498] According to the present invention, a protein complex of the present invention comprising a first protein, or a functionally active fragment or functionally active derivative thereof, selected from the group consisting of proteins listed in third column of table 1; and a second protein, or a functionally active fragment or functionally active derivative thereof, selected from the group consisting of proteins listed in fourth column of table 1, or a functionally active fragment or functionally active derivative thereof, can be used as an immunogen to generate antibodies which immunospecifically bind such immunogen. According to the present invention, also a protein complex of the present invention can be used as an immunogen to generate antibodies which immunospecifically bind to such immunogen comprising all proteins listed in fifth column of table 1.

[0499] Such antibodies include, but are not limited to, polyclonal, monoclonal, chimeric, single chain, Fab fragments, and an Fab expression library. In a specific embodiment, antibodies to a complex comprising human protein components are produced. In another embodiment, a complex formed from a fragment of said first protein and a fragment of said second protein, which fragments contain the protein domain that interacts with the other member of the complex, are used as an immunogen for antibody production. In a preferred embodiment, the antibody specific for the complex in that the antibody does not bind the individual protein components of the complex.

[0500] Polyclonal antibodies can be prepared as described above by immunizing a suitable subject with a polypeptide of the invention as an immunogen. Preferred polyclonal antibody compositions are ones that have been selected for antibodies directed against a polypeptide or polypeptides of the invention. Particularly preferred polyclonal antibody preparations are ones that contain only antibodies directed against a polypeptide or polypeptides of the invention. Particularly preferred immunogen compositions are those that contain no other human proteins such as, for example, immunogen compositions made using a non-human host cell for recombinant expression of a polypeptide of the invention. In such a manner, the only human epitope or epitopes recognized by the resulting antibody compositions raised against this immunogen will be present as part of a polypeptide or polypeptides of the invention.

[0501] The antibody titer in the immunized subject can be monitored over time by standard techniques, such as with an enzyme linked immunosorbent assay (ELISA) using immobilized polypeptide. If desired, the antibody molecules can be isolated from the mammal (e.g., from the blood) and further purified by well-known techniques, such as protein A chromatography to obtain the IgG fraction. Alternatively, antibodies specific for a protein or polypeptide of the invention can be selected for (e.g., partially purified) or purified by, e.g., affinity chromatography. For example, a recombinantly expressed and purified (or partially purified) protein of the invention is produced as described herein, and covalently or non-covalently coupled to a solid support such as, for example, a chromatography column. The column can then be used to affinity purify antibodies specific for the proteins of the invention from a sample containing antibodies directed against a large number of different epitopes, thereby generating a substantially purified antibody composition, i.e., one that is substantially free of contaminating antibodies. By a substantially purified antibody composition is meant, in this context, that the antibody sample contains at most only 30% (by dry weight) of contaminating antibodies directed against epitopes other than those on the desired protein or polypeptide of the invention, and preferably at most 20%, yet more preferably at most 10%, and most preferably at most 5% (by dry weight) of the sample is contaminating antibodies. A purified antibody composition means that at least 99% of the antibodies in the composition are directed against the desired protein or polypeptide of the invention.

[0502] At an appropriate time after immunization, e.g., when the specific antibody titers are highest, antibody-producing cells can be obtained from the subject and used to prepare monoclonal antibodies by standard techniques, such as the hybridoma technique originally described by Kohler and Milstein, 1975, Nature 256:495-497, the human B cell hybridoma technique (Kozbor et al., 1983, Immunol. Today 4:72), the EBV-hybridoma technique (Cole et al., 1985, Monoclonal Antibodies and Cancer Therapy, Alan R. Liss, Inc., pp. 77-96) or trioma techniques. The technology for producing hybridomas is well known (see generally Current Protocols in Immunology 1994, Coligan et al. (eds.) John Wiley & Sons, Inc., New York, N.Y.). Hybridoma cells producing a monoclonal antibody of the invention are detected by screening the hybridoma culture supernatants for antibodies that bind the polypeptide of interest, e.g., using a standard ELISA assay.

[0503] Alternative to preparing monoclonal antibody-secreting hybridomas, a monoclonal antibody directed against a polypeptide of the invention can be identified and isolated by screening a recombinant combinatorial immunoglobulin library (e.g., an antibody phage display library) with the polypeptide of interest. Kits for generating and screening phage display libraries are commercially available (e.g., the Pharmacia Recombinant Phage Antibody System, Catalog No. 27-9400-01; and the Stratagene SurfZAP Phage Display Kit, Catalog No. 240612). Additionally, examples of methods and reagents particularly amenable for use in generating and screening antibody display library can be found in, for example, U.S. Pat. No. 5,223,409; PCT Publication No. WO 92/18619; PCT Publication No. WO 91/17271; PCT Publication No. WO 92/20791; PCT Publication No. WO 92/15679; PCT Publication No. WO 93/01288; PCT Publication No. WO 92/01047; PCT Publication No. WO 92/09690; PCT Publication No. WO 90/02809; Fuchs et al., 1991, Bio/Technology 9:1370-1372; Hay et al., 1992, Hum. Antibod. Hybridomas 3:81-85; Huse et al., 1989, Science 246:1275-1281; Griffiths et al., 1993, EMBO J. 12:725-734.

[0504] Additionally, recombinant antibodies, such as chimeric and humanized monoclonal antibodies, comprising both human and non-human portions, which can be made using standard recombinant DNA techniques, are within the scope of the invention. A chimeric antibody is a molecule in which different portions are derived from different animal species, such as those having a variable region derived from a murine mAb and a human immunoglobulin constant region. (See, e.g., Cabilly et al., U.S. Pat. No. 4,816,567; and Boss et al., U.S. Pat. No. 4,816,397, which are incorporated herein by reference in their entirety.) Humanized antibodies are antibody molecules from non-human species having one or more complementarily determining regions (CDRs) from the non-human species and a framework region from a human immunoglobulin molecule. (See, e.g., Queen, U.S. Pat. No. 5,585,089, which is incorporated herein by reference in its entirety.) Such chimeric and humanized monoclonal antibodies can be produced by recombinant DNA techniques known in the art, for example using methods described in PCT Publication No. WO 87/02671; European Patent Application 184,187; European Patent Application 171,496; European Patent Application 173,494; PCT Publication No. WO 86/01533; U.S. Pat. No. 4,816,567; European Patent Application 125,023; Better et al., 1988, Science 240:1041-1043; Liu et al., 1987, Proc. Natl. Acad. Sci. USA 84:3439-3443; Liu et al., 1987, J. Immunol. 139:3521-3526; Sun et al., 1987, Proc. Natl. Acad. Sci. USA 84:214-218; Nishimura et al., 1987, Canc. Res. 47:999-1005; Wood et al., 1985, Nature 314:446-449; and Shaw et al., 1988, J. Natl. Cancer Inst. 80:1553-1559); Morrison, 1985, Science 229:1202-1207; Oi et al., 1986, Bio/Techniques 4:214; U.S. Pat. No. 5,225,539; Jones et al., 1986, Nature 321:552-525; Verhoeyan et al., 1988, Science 239:1534; and Beidler et al., 1988, J. Immunol. 141:4053-4060.

[0505] Completely human antibodies are particularly desirable for therapeutic treatment of human patients. Such antibodies can be produced, for example, using transgenic mice which are incapable of expressing endogenous immunoglobulin heavy and light chains genes, but which can express human heavy and light chain genes. The transgenic mice are immunized in the normal fashion with a selected antigen, e.g., all or a portion of a polypeptide of the invention. Monoclonal antibodies directed against the antigen can be obtained using conventional hybridoma technology. The human immunoglobulin transgenes harbored by the transgenic mice rearrange during B cell differentiation, and subsequently undergo class switching and somatic mutation. Thus, using such a technique, it is possible to produce therapeutically useful IgG, IgA and IgE antibodies. For an overview of this technology for producing human antibodies, see Lonberg and Huszar, 1995, Int. Rev. Immunol. 13:65-93). For a detailed discussion of this technology for producing human antibodies and human monoclonal antibodies and protocols for producing such antibodies, see, e.g., U.S. Pat. No. 5,625,126; U.S. Pat. No. 5,633,425; U.S. Pat. No. 5,569,825; U.S. Pat. No. 5,661,016; and U.S. Pat. No. 5,545,806. In addition, companies such as Abgenix, Inc. (Freemont, Calif.), can be engaged to provide human antibodies directed against a selected antigen using technology similar to that described above.

[0506] Completely human antibodies which recognize a selected epitope can be generated using a technique referred to as “guided selection.” In this approach a selected non-human monoclonal antibody, e.g., a murine antibody, is used to guide the selection of a completely human antibody recognizing the same epitope. (Jespers et al., 1994, Bio/technology 12:899-903).

[0507] Antibody fragments that contain the idiotypes of the complex can be generated by techniques known in the art. For example, such fragments include, but are not limited to, the F(ab′)2 fragment which can be produced by pepsin digestion of the antibody molecule; the Fab′ fragment that can be generated by reducing the disulfide bridges of the F(ab′)2 fragment; the Fab fragment that can be generated by treating the antibody molecular with papain and a reducing agent; and Fv fragments.

[0508] In the production of antibodies, screening for the desired antibody can be accomplished by techniques known in the art, e.g., ELISA (enzyme-linked immunosorbent assay). To select antibodies specific to a particular domain of the complex, or a derivative thereof, one may assay generated hybridomas for a product that binds to the fragment of the complex, or a derivative thereof, that contains such a domain. For selection of an antibody that specifically binds a complex of the present, or a derivative, or homologue thereof, but which does not specifically bind to the individual proteins of the complex, or a derivative, or homologue thereof, one can select on the basis of positive binding to the complex and a lack of binding to the individual protein components.

[0509] Antibodies specific to a domain of the complex, or a derivative, or homologue thereof, are also provided.

[0510] The foregoing antibodies can be used in methods known in the art relating to the localization and/or quantification of the complexes of the invention, e.g., for imaging these proteins, measuring levels thereof in appropriate physiological samples (by immunoassay), in diagnostic methods, etc. This hold true also for a derivative, or homologue thereof of a complex.

[0511] In another embodiment of the invention (see infra), an antibody to a complex or a fragment of such antibodies containing the antibody binding domain, is a therapeutic.

Diagnostic, Prognostic, and Screening Uses of the Protein Complexes/Proteins of the Invention

[0512] The particular protein complexes and proteins of the present invention may be markers of normal physiological processes, and thus have diagnostic utility. Further, definition of particular groups of patients with elevations or deficiencies of a protein complex of the present invention, or wherein the protein complex has a change in protein component composition, can lead to new nosological classifications of diseases, furthering diagnostic ability.

[0513] Examples for diseases or disorders are neurodegenerative disease such as Alzheimer's disease and related neurodegenerative disorders.

[0514] Detecting levels of protein complexes, or individual component proteins that form the complexes, or detecting levels of the mRNAs encoding the components of the complex, may be used in diagnosis, prognosis, and/or staging to follow the course of a disease state, to follow a therapeutic response, etc.

[0515] A protein complex of the present invention and the individual components of the complex and a derivative, analog or subsequence thereof, encoding nucleic acids (and sequences complementary thereto), and anti-complex antibodies and antibodies directed against individual components that can form the complex, are useful in diagnostics. The foregoing molecules can be used in assays, such as immunoassays, to detect, prognose, diagnose, or monitor various conditions, diseases, and disorders characterized by aberrant levels of a complex or aberrant component composition of a complex, or monitor the treatment of such various conditions, diseases, and disorders.

[0516] In particular, such an immunoassay is carried out by a method comprising contacting a sample derived from a patient with an anti-complex antibody under conditions such that immunospecific binding can occur, and detecting or measuring the amount of any immunospecific binding by the antibody. In a specific aspect, such binding of antibody, in tissue sections, can be used to detect aberrant complex localization, or aberrant (e.g., high, low or absent) levels of a protein complex or complexes. In a specific embodiment, an antibody to the complex can be used to assay a patient tissue or serum sample for the presence of the complex, where an aberrant level of the complex is an indication of a diseased condition. By “aberrant levels” is meant increased or decreased levels relative to that present, or a standard level representing that present, in an analogous sample from a portion or fluid of the body, or from a subject not having the disorder.

[0517] The immunoassays which can be used include but are not limited to competitive and non-competitive assay systems using techniques such as Western blots, radioimmunoassays, ELISA (enzyme linked immunosorbent assay), “sandwich” immunoassays, immunoprecipitation assays, precipitin reactions, gel diffusion precipitin reactions, immunodiffusion assays, agglutination assays, complement-fixation assays, immunoradiometric assays, fluorescent immunoassays, protein A immunoassays, to name but a few known in the art.

[0518] Nucleic acids encoding the components of the protein complex and related nucleic acid sequences and subsequences, including complementary sequences, can be used in hybridization assays. The nucleic acid sequences, or subsequences thereof, comprising about at least 8 nucleotides, can be used as hybridization probes. Hybridization assays can be used to detect, prognose, diagnose, or monitor conditions, disorders, or disease states associated with aberrant levels of the mRNAs encoding the components of a complex as described, supra. In particular, such a hybridization assay is carried out by a method comprising contacting a sample containing nucleic acid with a nucleic acid probe capable of hybridizing to component protein coding DNA or RNA, under conditions such that hybridization can occur, and detecting or measuring any resulting hybridization.

[0519] In specific embodiments, diseases and disorders involving or characterized by aberrant levels of a protein complex or aberrant complex composition can be diagnosed, or its suspected presence can be screened for, or a predisposition to develop such disorders can be detected, by determining the component protein composition of the complex, or detecting aberrant levels of a member of the complex or un-complexed component proteins or encoding nucleic acids, or functional activity including, but not restricted to, binding to an interacting partner, or by detecting mutations in component protein RNA, DNA or protein (e.g., mutations such as translocations, truncations, changes in nucleotide or amino acid sequence relative to wild-type that cause increased or decreased expression or activity of a complex, and/or component protein.

[0520] Such diseases and disorders include, but are not limited to neurodegenerative disease such as Alzheimer's disease and related neurodegenerative disorders.

[0521] By way of example, levels of a protein complex and the individual components of a complex can be detected by immunoassay, levels of component protein RNA or DNA can be detected by hybridization assays (e.g., Northern blots, dot blots, RNase protection assays), and binding of component proteins to each other (e.g., complex formation) can be measured by binding assays commonly known in the art. Translocations and point mutations in component protein genes can be detected by Southern blotting, RFLP analysis, PCR using primers that preferably generate a fragment spanning at least most of the gene by sequencing of genomic DNA or cDNA obtained from the patient, etc.

[0522] Assays well known in the art (e.g., assays described above such as immunoassays, nucleic acid hybridization assays, activity assays, etc.) can be used to determine whether one or more particular protein complexes are present at either increased or decreased levels, or are absent, in samples from patients suffering from a particular disease or disorder, or having a predisposition to develop such a disease or disorder, as compared to the levels in samples from subjects not having such a disease or disorder, or having a predisposition to develop such a disease or disorder. Additionally, these assays can be used to determine whether the ratio of the complex to the un-complexed components of the complex, is increased or decreased in samples from patients suffering from a particular disease or disorder, or having a predisposition to develop such a disease or disorder, as compared to the ratio in samples from subjects not having such a disease or disorder.

[0523] In the event that levels of one or more particular protein complexes (i.e., complexes formed from component protein derivatives, homologs, fragments, or analogs) are determined to be increased in patients suffering from a particular disease or disorder, or having a predisposition to develop such a disease or disorder, then the particular disease or disorder, or predisposition for a disease or disorder, can be diagnosed, have prognosis defined for, be screened for, or be monitored by detecting increased levels of the one or more protein complexes, increased levels of the mRNA that encodes one or more members of the one or more particular protein complexes, or by detecting increased complex functional activity.

[0524] Accordingly, in a specific embodiment of the present invention, diseases and disorders involving increased levels of one or more protein complexes can be diagnosed, or their suspected presence can be screened for, or a predisposition to develop such disorders can be detected, by detecting increased levels of the one or more protein complexes, the mRNA encoding both members of the complex, or complex functional activity, or by detecting mutations in the component proteins that stabilize or enhance complex formation, e.g., mutations such as translocations in nucleic acids, truncations in the gene or protein, changes in nucleotide or amino acid sequence relative to wild-type, that stabilize or enhance complex formation.

[0525] In the event that levels of one or more particular protein complexes are determined to be decreased in patients suffering from a particular disease or disorder, or having a predisposition to develop such a disease or disorder, then the particular disease or disorder or predisposition for a disease or disorder can be diagnosed, have its prognosis determined, be screened for, or be monitored by detecting decreased levels of the one or more protein complexes, the mRNA that encodes one or more members of the particular one or more protein complexes, or by detecting decreased protein complex functional activity.

[0526] Accordingly, in a specific embodiment of the invention, diseases and disorders involving decreased levels of one or more protein complexes can be diagnosed, or their suspected presence can be screened for, or a predisposition to develop such disorders can be detected, by detecting decreased levels of the one or more protein complexes, the mRNA encoding one or more members of the one or more complexes, or complex functional activity, or by detecting mutations in the component proteins that decrease complex formation, e.g., mutations such as translocations in nucleic acids, truncations in the gene or protein, changes in nucleotide or amino acid sequence relative to wild-type, that decrease complex formation.

[0527] Accordingly, in a specific embodiment of the invention, diseases and disorders involving aberrant compositions of the complexes can be diagnosed, or their suspected presence can be screened for, or a predisposition to develop such disorders can be detected, by detecting the component proteins of one or more complexes, or the mRNA encoding the members of the one or more complexes.

[0528] The use of detection techniques, especially those involving antibodies against a protein complex, provides a method of detecting specific cells that express the complex or component proteins. Using such assays, specific cell types can be defined in which one or more particular protein complexes are expressed, and the presence of the complex or component proteins can be correlated with cell viability, state, health, etc.

[0529] Also embodied are methods to detect a protein complex of the present invention in cell culture models that express particular protein complexes or derivatives thereof, for the purpose of characterizing or preparing the complexes for harvest. This embodiment includes cell sorting of prokaryotes such as but not restricted to bacteria (Davey and Kell, 1996, Microbiol. Rev. 60:641-696), primary cultures and tissue specimens from eukaryotes, including mammalian species such as human (Steele et al., 1996, Clin. Obstet. Gynecol 39:801-813), and continuous cell cultures (Orfao and Ruiz-Arguelles, 1996, Clin. Biochem. 29:5-9). Such isolations can be used as methods of diagnosis, described, supra.

[0530] In a further specific embodiment, a modulation of the formation process of a complex can be determined.

[0531] Such a modulation can either be a change in the typical time course of its formation or a change in the typical steps leading to the formation of the complete complex.

[0532] Such changes can for example be detected by analysing and comparing the process of complex formation in untreated wild type cells of a particular type and/or cells showing or having the predisposition to develop a certain disease phenotype and/or cells which have been treated with particular conditions and/or particular agents in a particular situation.

[0533] Methods to study such changes in time course are well known in the art and include for example Western-blot analysis of the proteins in the complex isolated at different steps of its formation.

[0534] Furthermore an aberrant intracellular localization of the protein complex and/or an abberant transcription level of a gene dependent on the complex and/or the abundance and/or activity of a protein or protein complex dependent on the function of the complex and/or a gene dependent on the complex can serve as a marker for a disease and thus have diagnostic utility for any disease which is caused by an aberrant activity, function, composition or formation of the complex of the invention.

[0535] Methods to study the intracellular localization are well known in the art and include, but are not limited to immunofluorescence analysis using antibodies specific for components of the protein. Preferentially, double-stainings including staining of other cellular structures are being used to facilitate the detection of the intracellular localization. Methods to analyse the transcription levels of a gene dependent on the complex are also well known in the art and include Northern blot analysis, quantitative PCR etc. The abundance of proteins dependent on the protein can be analyzed as described supra. Methods to study changes in the activity of proteins dependent on complex depend on the protein. The choice of such methods will be apparent to any person skilled in the art.

Therapeutic Uses of Protein Complexes/Proteins of the Invention

[0536] The present invention is directed to a method for treatment or prevention of various diseases and disorders by administration of a therapeutic compound (termed herein “therapeutic”). Such “therapeutics” include, but are not limited to, a protein complex of the present invention, the individual component proteins, and analogs and derivatives (including fragments) of the foregoing (e.g., as described hereinabove); antibodies thereto (as described hereinabove); nucleic acids encoding the component protein, and analogs or derivatives, thereof (e.g., as described hereinabove); component protein antisense nucleic acids, and agents that modulate complex formation and/or activity (i.e., agonists and antagonists).

[0537] The protein complexes as identified herein can be implicated in processes which are implicated in or associated with pathological conditions.

[0538] Diseases and disorders which can be treated and/or prevented and/or diagnosed by therapeutics interacting with any of the complexes provided herein are for example neurodegenerative diseases such as Alzheimer's disease and related neurodegenerative disorders, inflammatory diseases such as chronic inflammatory disorders, rheumatoid arthritis and inflammatory bowel disease.

[0539] These disorders are treated or prevented by administration of a therapeutic that modulates (i.e. inhibits or promotes) protein complex activity or formation or modulates its function or composition. Diseases or disorders associated with aberrant levels of complex activity or formation, or aberrant levels or activity of the component proteins, or aberrant complex composition or a change in the function, may be treated by administration of a therapeutic that modulates complex formation or activity or by the administration of a protein complex.

[0540] Therapeutics may also be administered to modulate complex formation or activity or level thereof in a microbial organism such as yeast, fungi such as candida albicans causing an infectious disease in animals or humans.

[0541] Diseases and disorders characterized by increased (relative to a subject not suffering from the disease or disorder) complex levels or activity can be treated with therapeutics that antagonize (i.e., reduce or inhibit) complex formation or activity. Therapeutics that can be used include, but are not limited to, the component proteins or an analog, derivative or fragment of the component protein; anti-complex antibodies (e.g., antibodies specific for the protein complex, or a fragment or derivative of the antibody containing the binding region thereof; nucleic acids encoding the component proteins; antisense nucleic acids complementary to nucleic acids encoding the component proteins; and nucleic acids encoding the component protein that are dysfunctional due to, e.g., a heterologous insertion within the protein coding sequence, that are used to “knockout” endogenous protein function by homologous recombination, see, e.g., Capecchi, 1989, Science 244:1288-1292. In one embodiment, a therapeutic is 1, 2 or more antisense nucleic acids which are complementary to 1, 2, or more nucleic acids, respectfully, that encode component proteins of a complex.

[0542] In a specific embodiment of the present invention, a nucleic acid containing a portion of a component protein gene in which gene sequences flank (are both 5′ and 3′ to) a different gene sequence, is used as a component protein antagonist, or to promote component protein inactivation by homologous recombination (see also, Koller and Smithies, 1989, Proc. Natl. Acad. Sci. USA 86:8932-8935; Zijlstra et al., 1989, Nature 342: 435-438). Additionally, mutants or derivatives of a component protein that has greater affinity for another component protein or the complex than wild type may be administered to compete with wild type protein for binding, thereby reducing the levels of complexes containing the wild type protein. Other therapeutics that inhibit complex function can be identified by use of known convenient in vitro assays, e.g., based on their ability to inhibit complex formation, or as described in Section “Assays of protein complexes/proteins of the invention and derivatives and analogs thereof”, infra.

[0543] In specific embodiments, therapeutics that antagonize complex formation or activity are administered therapeutically, including prophylactically, (1) in diseases or disorders involving an increased (relative to normal or desired) level of a complex, for example, in patients where complexes are overactive or overexpressed; or (2) in diseases or disorders where an in vitro (or in vivo) assay (see infra) indicates the utility of antagonist administration. Increased levels of a complex can be readily detected, e.g., by quantifying protein and/or RNA, by obtaining a patient tissue sample (e.g., from biopsy tissue) and assaying it in vitro for RNA or protein levels, or structure and/or activity of the expressed complex (or the encoding mRNA). Many methods standard in the art can be thus employed including, but not limited to, immunoassays to detect complexes and/or visualize complexes (e.g., Western blot analysis, immunoprecipitation followed by sodium dodecyl sulfate polyacrylamide gel electrophoresis [SDS-PAGE], immunocytochemistry, etc.), and/or hybridization assays to detect concurrent expression of component protein mRNA (e.g., Northern assays, dot blot analysis, in situ hybridization, etc.).

[0544] A more specific embodiment of the present invention is directed to a method of reducing complex expression (i.e., expression of the protein components of the complex and/or formation of the complex) by targeting mRNAs that express the protein moieties. RNA therapeutics currently fall within three classes, antisense species, ribozymes, or RNA aptamers (Good et al., 1997, Gene Therapy 4:45-54).

[0545] Antisense oligonucleotides have been the most widely used. By way of example, but not limitation, antisense oligonucleotide methodology to reduce complex formation is presented below, infra. Ribozyme therapy involves the administration, induced expression, etc. of small RNA molecules with enzymatic ability to cleave, bind, or otherwise inactivate specific RNAs, to reduce or eliminate expression of particular proteins (Grassi and Marini, 1996, Annals of Medicine 28:499-510; Gibson, 1996, Cancer and Metastasis Reviews 15:287-299). RNA aptamers are specific RNA ligand proteins, such as for Tat and Rev RNA (Good et al., 1997, Gene Therapy 4:45-54) that can specifically inhibit their translation. Aptamers specific for component proteins can be identified by many methods well known in the art, for example, by affecting the formation of a complex in the protein-protein interaction assay described, infra.

[0546] In another embodiment, the activity or levels of a component protein are reduced by administration of another component protein, or the encoding nucleic acid, or an antibody that immunospecifically binds to the component protein, or a fragment or a derivative of the antibody containing the binding domain thereof.

[0547] In another aspect of the invention, diseases or disorders associated with increased levels of an component protein of the complex may be treated or prevented by administration of a therapeutic that increases complex formation if the complex formation acts to reduce or inactivate the component protein through complex formation. Such diseases or disorders can be treated or prevented by administration of one component member of the complex, administration of antibodies or other molecules that stabilize the complex, etc.

[0548] Diseases and disorders associated with underexpression of a complex, or a component protein, are treated or prevented by administration of a therapeutic that promotes (i.e., increases or supplies) complex levels and/or function, or individual component protein function. Examples of such a therapeutic include but are not limited to a complex or a derivative, analog or fragment of the complex that are functionally active (e.g., able to form a complex), un-complexed component proteins and derivatives, analogs, and fragments of un-complexed component proteins, and nucleic acids encoding the members of a complex or functionally active derivatives or fragments of the members of the complex, e.g., for use in gene therapy. In a specific embodiment, a therapeutic includes derivatives, homologs or fragments of a component protein that increase and/or stabilize complex formation. Examples of other agonists can be identified using in vitro assays or animal models, examples of which are described, infra.

[0549] In yet other specific embodiments of the present invention, therapeutics that promote complex function are administered therapeutically, including prophylactically, (1) in diseases or disorders involving an absence or decreased (relative to normal or desired) level of a complex, for example, in patients where a complex, or the individual components necessary to form the complex, is lacking, genetically defective, biologically inactive or underactive, or under-expressed; or (2) in diseases or disorders wherein an in vitro or in vivo assay (see, infra) indicates the utility of complex agonist administration. The absence or decreased level of a complex, component protein or function can be readily detected, e.g., by obtaining a patient tissue sample (e.g., from biopsy tissue) and assaying it in vitro for RNA or protein levels, structure and/or activity of the expressed complex and/or the concurrent expression of mRNA encoding the two components of the complex. Many methods standard in the art can be thus employed, including but not limited to immunoassays to detect and/or visualize a complex, or the individual components of a complex (e.g., Western blot analysis, immunoprecipitation followed by sodium dodecyl sulfate polyacrylamide gel electrophoresis [SDS-PAGE], immunocytochemistry, etc.) and/or hybridization assays to detect expression of nRNAs encoding the individual protein components of a complex by detecting and/or visualizing component mRNA concurrently or separately using, e.g., Northern assays, dot blot analysis, in situ hybridization, etc.

[0550] In specific embodiments, the activity or levels of a component protein are increased by administration of another component protein of the same complex, or a derivative, homolog or analog thereof, a nucleic acid encoding the other component, or an agent that stabilizes or enhances the other component, or a fragment or derivative of such an agent.

[0551] Generally, administration of products of species origin or species reactivity (in the case of antibodies) that is the same species as that of the patient is preferred. Thus, in a preferred embodiment, a human complex, or derivative, homolog or analog thereof; nucleic acids encoding the members of the human complex or a derivative, homolog or analog thereof; an antibody to a human complex, or a derivative thereof; or other human agents that affect component proteins or the complex, are therapeutically or prophylactically administered to a human patient.

[0552] Preferably, suitable in vitro or in vivo assays are utilized to determine the effect of a specific therapeutic and whether its administration is indicated for treatment of the affected tissue or individual.

[0553] In various specific embodiments, in vitro assays can be carried out with representative cells of cell types involved in a patient's disorder, to determine if a therapeutic has a desired effect upon such cell types.

[0554] Compounds for use in therapy can be tested in suitable animal model systems prior to testing in humans, including, but not limited to, rats, mice, chicken, cows, monkeys, rabbits, etc. For in vivo testing, prior to administration to humans, any animal model system known in the art may be used. Additional descriptions and sources of therapeutics that can be used according to the invention are found in Sections “Protein complexes/Proteins of the invention” to “Diagnostic, prognostic and screening uses of the protein complexes/proteins of the invention” and “Pharmaceutical compositions and therapeutic/prophylactic administration” herein.

4.4.1 Gene Therapy

[0555] In a specific embodiment of the present invention, nucleic acids comprising a sequence encoding the component proteins, or a functional derivative thereof, are administered to modulate complex activity or formation by way of gene therapy. Gene therapy refers to therapy performed by the administration of a nucleic acid to a subject. In this embodiment of the present invention, the nucleic acid expresses its encoded protein(s) that mediates a therapeutic effect by modulating complex activity or formation. Any of the methods for gene therapy available in the art can be used according to the present invention. Exemplary methods are described below.

[0556] For general reviews of the methods of gene therapy, see Goldspiel et al., 1993, Clinical Pharmacy 12:488-505; Wu and Wu, 1991, Biotherapy 3:87-95; Tolstoshev, 1993, Ann. Rev. Pharmacol. Toxicol. 32:573-596; Mulligan, 1993, Science 260:926-932; Morgan and Anderson, 1993, Ann. Rev. Biochem. 62:191-217; and May, 1993, TIBTECH 11:155-215. Methods commonly known in the art of recombinant DNA technology which can be used are described in Ausubel et al., eds., 1993, Current Protocols in Molecular Biology, John Wiley & Sons, NY; and Kriegler, 1990, Gene Transfer and Expression, A Laboratory Manual, Stockton Press, NY.

[0557] In a preferred aspect, the therapeutic comprises a nucleic acid that is part of an expression vector that expresses one or more of the component proteins, or fragments or chimeric proteins thereof, in a suitable host. In particular, such a nucleic acid has a promoter operably linked to the protein coding region(s) (or, less preferably separate promoters linked to the separate coding regions separately), said promoter being inducible or constitutive, and optionally, tissue-specific. In another particular embodiment, a nucleic acid molecule is used in which the coding sequences, and any other desired sequences, are flanked by regions that promote homologous recombination at a desired site in the genome, thus providing for intra-chromosomal expression of the component protein nucleic acids (Koller and Smithies, 1989, Proc. Natl. Acad. Sci. USA 86:8932-8935; Zijlstra et al., 1989, Nature 342:435-438).

[0558] Delivery of the nucleic acid into a patient may be either direct, in which case the patient is directly exposed to the nucleic acid or nucleic acid-carrying vector, or indirect, in which case, cells are first transformed with the nucleic acid in vitro, then transplanted into the patient. These two approaches are known, respectively, as in vivo or ex vivo gene therapy.

[0559] In a specific embodiment, the nucleic acid is directly administered in vivo, where it is expressed to produce the encoded product. This can be accomplished by any of numerous methods known in the art, e.g., by constructing it as part of an appropriate nucleic acid expression vector and administering it so that it becomes intracellular, e.g., by infection using a defective or attenuated retroviral or other viral vector (U.S. Pat. No. 4,980,286), or by direct injection of naked DNA, or by use of microparticle bombardment (e.g., a gene gun; Biolistic, Dupont), or coating with lipids or cell-surface receptors, or through use of transfecting agents, by encapsulation in liposomes, microparticles, or microcapsules, or by administering it in linkage to a peptide that is known to enter the nucleus, or by administering it in linkage to a ligand subject to receptor-mediated endocytosis that can be used to target cell types specifically expressing the receptors (e.g., Wu and Wu, 1987, J. Biol. Chem. 262:4429-4432), etc. In another embodiment, a nucleic acid-ligand complex can be formed in which the ligand comprises a fusogenic viral peptide that disrupts endosomes, allowing the nucleic acid to avoid lysosomal degradation. In yet another embodiment, the nucleic acid can be targeted in vivo for cell specific uptake and expression, by targeting a specific receptor (see, e.g., international Patent Publications WO 92/06180; WO 92/22635; WO 92/20316; WO 93/14188; and WO 93/20221. Alternatively, the nucleic acid can be introduced intracellularly and incorporated within host cell DNA for expression, by homologous recombination (Koller and Smithies, 1989, Proc. Natl. Acad. Sci. USA 86:8932-8935; Zijlstra et al., 1989, Nature 342:435-438).

[0560] In a specific embodiment, a viral vector that contains the component protein encoding nucleic acids is used. For example, a retroviral vector can be used (Miller et al., 1993, Meth. Enzymol. 217:581-599). These retroviral vectors have been modified to delete retroviral sequences that are not necessary for packaging of the viral genome and integration into host cell DNA. The encoding nucleic acids to be used in gene therapy is/are cloned into the vector, which facilitates delivery of the gene into a patient. More detail about retroviral vectors can be found in Boesen et al., 1994, Biotherapy 6:291-302, which describes the use of a retroviral vector to deliver the mdr1 gene to hematopoetic stem cells in order to make the stem cells more resistant to chemotherapy. Other references illustrating the use of retroviral vectors in gene therapy are Clowes et al., 1994, J. Clin. Invest. 93:644-651; Kiem et al., 1994, Blood 83:1467-1473; Salmons and Gunzberg, 1993, Human Gene Therapy 4:129-141; and Grossman and Wilson, 1993, Curr. Opin. in Genetics and Devel. 3:110-114.

[0561] Adenoviruses are other viral vectors that can be used in gene therapy. Adenoviruses are especially attractive vehicles for delivering genes to respiratory epithelia. Adenoviruses naturally infect respiratory epithelia where they cause a mild disease. Other targets for adenovirus-based delivery systems are the liver, the central nervous system, endothelial cells and muscle. Adenoviruses have the advantage of being capable of infecting non-dividing cells. Kozarsky and Wilson, 1993, Curr. Opin. Genet. Devel. 3:499-503, discuss adenovirus-based gene therapy. The use of adenovirus vectors to transfer genes to the respiratory epithelia of rhesus monkeys has been demonstrated by Bout et al., 1994, Human Gene Therapy 5:3-10. Other instances of the use of adenoviruses in gene therapy can be found in Rosenfeld et al., 1991, Science 252:431-434; Rosenfeld et al., 1992, Cell 68:143-155; and Mastrangeli et al., 1993, J. Clin. Invest. 91:225-234.

[0562] Adeno-associated virus (AAV) has also been proposed for use in gene therapy (Walsh et al., 1993, Proc. Soc. Exp. Biol. Med. 204:289-300.

[0563] Another approach to gene therapy involves transferring a gene into cells in tissue culture by methods such as electroporation, lipofection, calcium phosphate-mediated transfection, or viral infection. Usually, the method of transfer includes the transfer of a selectable marker to the cells. The cells are then placed under selection to isolate those cells that have taken up and are expressing the transferred gene from these that have not. Those cells are then delivered to a patient.

[0564] In this embodiment, the nucleic acid is introduced into a cell prior to administration in vivo of the resulting recombinant cell. Such introduction can be carried out by any method known in the art including, but not limited to, transfection by electroporation, microinjection, infection with a viral or bacteriophage vector containing the nucleic acid sequences, cell fusion, chromosome-mediated gene transfer, microcell-mediated gene transfer, spheroplast fusion, etc. Numerous techniques are known in the art for the introduction of foreign genes into cells (see, e.g., Loeffler and Behr, 1993, Meth. Enzymol. 217:599-618; Cohen et al., 1993, Meth. Enzymol. 217:618-644; Cline, 1985, Pharmac. Ther. 29:69-92) and may be used in accordance with the present invention, provided that the necessary developmental and physiological functions of the recipient cells are not disrupted. The technique should provide for the stable transfer of the nucleic acid to the cell, so that the nucleic acid is expressible by the cell and preferably, is heritable and expressible by its cell progeny.

[0565] The resulting recombinant cells can be delivered to a patient by various methods known in the art. In a preferred embodiment, epithelial cells are injected, e.g., subcutaneously. In another embodiment, recombinant skin cells may be applied as a skin graft onto the patient. Recombinant blood cells (e.g., hematopoetic stem or progenitor cells) are preferably administered intravenously. The amount of cells envisioned for use depends on the desired effect, patient state, etc., and can be determined by one skilled in the art.

[0566] Cells into which a nucleic acid can be introduced for purposes of gene therapy encompass any desired, available cell type, and include but are not limited to epithelial cells, endothelial cells, keratinocytes, fibroblasts, muscle cells, hepatocytes, blood cells such as T lymphocytes, B lymphocytes, monocytes, macrophages, neutrophils, eosinophils, megakaryocytes, and granulocytes, various stem or progenitor cells, in particular hematopoetic stem or progenitor cells, e.g., as obtained from bone marrow, umbilical cord blood, peripheral blood, fetal liver, etc.

[0567] In a preferred embodiment, the cell used for gene therapy is autologous to the patient.

[0568] In an embodiment in which recombinant cells are used in gene therapy, a component protein encoding nucleic acid is/are introduced into the cells such that the gene or genes are expressible by the cells or their progeny, and the recombinant cells are then administered in vivo for therapeutic effect. In a specific embodiment, stem or progenitor cells are used. Any stem and/or progenitor cells which can be isolated and maintained in vitro can potentially be used in accordance with this embodiment of the present invention. Such stem cells include but are not limited to hematopoetic stem cells (HSCs), stem cells of epithelial tissues such as the skin and the lining of the gut, embryonic heart muscle cells, liver stem cells (International Patent Publication WO 94/08598), and neural stem cells (Stemple and Anderson, 1992, Cell 71:973-985).

[0569] Epithelial stem cells (ESCs), or keratinocytes, can be obtained from tissues such as the skin and the lining of the gut by known procedures (Rheinwald, 1980, Meth. Cell Biol. 2A:229). In stratified epithelial tissue such as the skin, renewal occurs by mitosis of stem cells within the germinal layer, the layer closest to the basal lamina. Similarly, stem cells within the lining of the gut provide for a rapid renewal rate of this tissue. ESCs or keratinocytes obtained from the skin or lining of the gut of a patient or donor can be grown in tissue culture (Rheinwald, 1980, Meth. Cell Bio. 2A:229; Pittelkow and Scott, 1986, Mayo Clinic Proc. 61:771). If the ESCs are provided by a donor, a method for suppression of host versus graft reactivity (e.g., irradiation, or drug or antibody administration to promote moderate immunosuppression) can also be used.

[0570] With respect to hematopoetic stem cells (HSCs), any technique that provides for the isolation, propagation, and maintenance in vitro of HSCs can be used in this embodiment of the invention. Techniques by which this may be accomplished include (a) the isolation and establishment of HSC cultures from bone marrow cells isolated from the future host, or a donor, or (b) the use of previously established long-term HSC cultures, which may be allogeneic or xenogeneic. Non-autologous HSCs are used preferably in conjunction with a method of suppressing transplantation immune reactions between the future host and patient. In a particular embodiment of the present invention, human bone marrow cells can be obtained from the posterior iliac crest by needle aspiration (see, e.g., Kodo et al., 1984, J. Clin. Invest. 73: 1377-1384). In a preferred embodiment of the present invention, the HSCs can be made highly enriched or in substantially pure form. This enrichment can be accomplished before, during, or after long-term culturing, and can be done by any technique known in the art. Long-term cultures of bone marrow cells can be established and maintained by using, for example, modified Dexter cell culture techniques (Dexter et al., 1977, J. Cell Physiol. 91:335) or Witlock-Witte culture techniques (Witlock and Witte, 1982, Proc. Natl. Acad. Sci. USA 79:3608-3612).

[0571] In a specific embodiment, the nucleic acid to be introduced for purposes of gene therapy comprises an inducible promoter operably linked to the coding region, such that expression of the nucleic acid is controllable by controlling the presence or absence of the appropriate inducer of transcription.

[0572] Additional methods can be adapted for use to deliver a nucleic acid encoding the component proteins, or functional derivatives thereof, e.g., as described in Section “Protein complexes/Proteins of the invention”, supra.

Use of Antisense Oligonucleotides for Suppression of Protein Complex Formation or Protein Complex/Protein Activity

[0573] In a specific embodiment of the present invention, protein complex activity and formation and protein activity is inhibited by use of antisense nucleic acids for the component proteins of the complex, that inhibit transcription and/or translation of their complementary sequence. The present invention provides the therapeutic or prophylactic use of nucleic acids of at least six nucleotides that are antisense to a gene or cDNA encoding a component protein, or a portion thereof. An “antisense” nucleic acid as used herein refers to a nucleic acid capable of hybridizing to a sequence-specific portion of a component protein RNA (preferably mRNA) by virtue of some sequence complementarity. The antisense nucleic acid may be complementary to a coding and/or noncoding region of a component protein mRNA. Such antisense nucleic acids that inhibit complex formation or activity have utility as therapeutics, and can be used in the treatment or prevention of disorders as described supra.

[0574] The antisense nucleic acids of the invention can be oligonucleotides that are double-stranded or single-stranded, RNA or DNA, or a modification or derivative thereof, which can be directly administered to a cell, or which can be produced intracellularly by transcription of exogenous, introduced sequences.

[0575] In another embodiment, the present invention is directed to a method for inhibiting the expression of component protein nucleic acid sequences, in a prokaryotic or eukaryotic cell, comprising providing the cell with an effective amount of a composition comprising an antisense nucleic acid of the component protein, or a derivative thereof, of the invention.

[0576] The antisense nucleic acids are of at least six nucleotides and are preferably oligonucleotides, ranging from 6 to about 200 nucleotides. In specific aspects, the oligonucleotide is at least 10 nucleotides, at least 15 nucleotides, at least 100 nucleotides, or at least 200 nucleotides. The oligonucleotides can be DNA or RNA or chimeric mixtures, or derivatives or modified versions thereof, and either single-stranded or double-stranded. The oligonucleotide can be modified at the base moiety, sugar moiety, or phosphate backbone. The oligonucleotide may include other appending groups such as peptides, agents facilitating transport across the cell membrane (see, e.g., Letsinger et al., 1989, Proc. Natl. Acad. Sci. USA 86:6553-6556; Lemaitre et al., 1987, Proc. Natl. Acad. Sci. USA 84:648-652; International Patent Publication No. WO 88/09810) or blood-brain barrier (see, e.g., International Patent Publication No. WO 89/10134), hybridization-triggered cleavage agents (see, e.g., Krol et al., 1988, BioTechniques 6:958-976), or intercalating agents (see, e.g., Zon, 1988, Pharm. Res. 5:539-549).

[0577] In a preferred aspect of the invention, an antisense oligonucleotide is provided, preferably as single-stranded DNA. The oligonucleotide may be modified at any position in its structure with constituents generally known in the art.

[0578] The antisense oligonucleotides may comprise at least one modified base moiety which is selected from the group including but not limited to 5-fluorouracil, 5-bromouracil, 5-chlorouracil, 5-iodouracil, hypoxanthine, xanthine, 4-acetylcytosine, 5-(carboxyhydroxylmethyl)uracil, 5-carboxymethylaminomethyl-2-thio-uridine, 5-carboxymethylaminomethyluracil, dihydrouracil, β-D-galactosylqueosine, inosine, N6-isopentenyladenine, 1-methylguanine, 1-methylinosine, 2,2-dimethylguanine, 2-methyladenine, 2-methylguanine, 3-methylcytosine, 5-methylcytosine, N6-adenine, 7-methylguanine, 5-methylaminomethyluracil, 5-methoxyaminomethyl-2-thiouracil, □-D-mannosylqueosine, 5N-methoxycarboxymethyluracil, 5-methoxyuracil, 2-methyl-thio-N-6-isopentenyladenine, uracil-5-oxyacetic acid (v), wybutoxosine, pseudouracil, queosine, 2-thiocytosine, 5-methyl-2-thiouracil, 2-thiouracil, 4-thiouracil, 5-methyluracil, uracil-5-oxyacetic acid methylester, uracil-5-oxyacetic acid (v), 5-methyl-2-thiouracil, 3-(3-amino-3-N-2-carboxypropyl)uracil, (acp3)w, and 2,6-diaminopurine.

[0579] In another embodiment, the oligonucleotide comprises at least one modified sugar moiety selected from the group including, but not limited to, arabinose, 2-fluoroarabinose, xylulose, and hexose.

[0580] In yet another embodiment, the oligonucleotide comprises at least one modified phosphate backbone selected from the group consisting of a phosphorothioate, a phosphorodithioate, a phosphoramidothioate, a phosphoramidate, a phosphordiamidate, a methylphosphonate, an alkyl phosphotriester, and a formacetal, or an analog of the foregoing.

[0581] In yet another embodiment, the oligonucleotide is a 2-a-anomeric oligonucleotide. An a-anomeric oligonucleotide forms specific double-stranded hybrids with complementary RNA in which, contrary to the usual β-units, the strands run parallel to each other (Gautier et al., 1987, Nucl. Acids Res. 15:6625-6641).

[0582] The oligonucleotide may be conjugated to another molecule, e.g., a peptide, hybridization-triggered cross-linking agent, transport agent, hybridization-triggered cleavage agent, etc.

[0583] Oligonucleotides of the invention may be synthesized by standard methods known in the art, e.g., by use of an automated DNA synthesizer (such as are commercially avail-able from Biosearch, Applied Biosystems, etc.). As examples, phosphorothioate oligo-nucleotides may be synthesized by the method of Stein et al. (1988, Nucl. Acids Res. 16:3209), methylphosphonate oligonucleotides can be prepared by use of controlled pore glass polymer supports (Sarin et al., 1988, Proc. Natl. Acad. Sci. USA 85:7448-7451), etc.

[0584] In a specific embodiment, the antisense oligonucleotides comprise catalytic RNAs, or ribozymes (see, e.g., International Patent Publication No. WO 90/11364; Sarver et al., 1990, Science 247:1222-1225). In another embodiment, the oligonucleotide is a 2′-0-methylribonucleotide (Inoue et al., 1987, Nucl. Acids Res. 15:6131-6148), or a chimeric RNA-DNA analog (Inoue et al., 1987, FEBS Lett. 215:327-330).

[0585] In an alternative embodiment, the antisense nucleic acids of the invention are produced intracellularly by transcription from an exogenous sequence. For example, a vector can be introduced in vivo such that it is taken up by a cell, within which cell the vector or a portion thereof is transcribed, producing an antisense nucleic acid (RNA) of the invention. Such a vector would contain a sequence encoding the component protein. Such a vector can remain episomal or become chromosomally integrated, as long as it can be transcribed to produce the desired antisense RNA. Such vectors can be constructed by recombinant DNA technology methods standard in the art. Vectors can be plasmid, viral, or others known in the art to be capable of replication and expression in mammalian cells. Expression of the sequences encoding the antisense RNAs can be by any promoter known in the art to act in mammalian, preferably human, cells. Such promoters can be inducible or constitutive. Such promoters include, but are not limited to, the SV40 early promoter region (Bernoist and Chambon, 1981, Nature 290:304-310), the promoter contained in the 3′ long terminal repeat of Rous sarcoma virus (Yamamoto et al., 1980, Cell 22:787-797), the herpes thymidine kinase promoter (Wagner et al., 1981, Proc. Natl. Acad. Sci. USA 78:1441-1445), the regulatory sequences of the metallothionein gene (Brinster et al., 1982, Nature 296:39-42), etc.

[0586] The antisense nucleic acids of the invention comprise a sequence complementary to at least a portion of an RNA transcript of a component protein gene, preferably a human gene. However, absolute complementarity, although preferred, is not required. A sequence “complementary to at least a portion of an RNA,” as referred to herein, means a sequence having sufficient complementarity to be able to hybridize with the RNA, forming a stable duplex; in the case of double-stranded antisense nucleic acids, a single strand of the duplex DNA may thus be tested, or triplex formation may be assayed. The ability to hybridize will depend on both the degree of complementarity and the length of the antisense nucleic acid. Generally, the longer the hybridizing nucleic acid, the more base mismatches with a component protein RNA it may contain and still form a stable duplex (or triplex, as the case may be). One skilled in the art can ascertain a tolerable degree of mismatch by use of standard procedures to determine the melting point of the hybridized complex.

[0587] The component protein antisense nucleic acids can be used to treat (or prevent) disorders of a cell type that expresses, or preferably overexpresses, a protein complex.

[0588] Cell types that express or overexpress component protein RNA can be identified by various methods known in the art. Such methods include, but are not limited to, hybridization with component protein-specific nucleic acids (e.g., by Northern blot hybridization, dot blot hybridization, or in situ hybridization), or by observing the ability of RNA from the cell type to be translated in vitro into the component protein by immunohistochemistry, Western blot analysis, ELISA, etc. In a preferred aspect, primary tissue from a patient can be assayed for protein expression prior to treatment, e.g., by immunocytochemistry, in situ hybridization, or any number of methods to detect protein or mRNA expression.

[0589] Pharmaceutical compositions of the invention (see Section “Pharmaceutical compositions and therapeutic/prophylactic administration”, infra), comprising an effective amount of a protein component antisense nucleic acid in a pharmaceutically acceptable carrier can be administered to a patient having a disease or disorder that is of a type that expresses or overexpresses a protein complex of the present invention.

[0590] The amount of antisense nucleic acid that will be effective in the treatment of a particular disorder or condition will depend on the nature of the disorder or condition, and can be determined by standard clinical techniques. Where possible, it is desirable to determine the antisense cytotoxicity in vitro, and then in useful animal model systems, prior to testing and use in humans.

[0591] In a specific embodiment, pharmaceutical compositions comprising antisense nucleic acids are administered via liposomes, microparticles, or microcapsules. In various embodiments of the invention, it may be useful to use such compositions to achieve sustained release of the antisense nucleic acids. In a specific embodiment, it may be desirable to utilize liposomes targeted via antibodies to specific identifiable central nervous system cell types (Leonetti et al., 1990, Proc. Natl. Acad. Sci. U.S.A. 87:2448-2451; Renneisen et al., 1990, J. Biol. Chem. 265:16337-16342).

Assays of Protein Complexes/Proteins of the Invention and Derivatives and Analogs Thereof

[0592] The functional activity of a protein complex of the present invention, or a derivative, fragment or analog thereof or protein component thereof, can be assayed by various methods. Potential modulators (e.g., agonists and antagonists) of complex activity or formation, e.g., anti-complex antibodies and antisense nucleic acids, can be assayed for the ability to modulate complex activity or formation.

[0593] In one embodiment of the present invention, where one is assaying for the ability to bind or compete with a wild-type complex for binding to an anti-complex antibody, various immunoassays known in the art can be used, including but not limited to competitive and non-competitive assay systems using techniques such as radioimmunoassay, ELISA (enzyme linked immunosorbent assay), “sandwich” immunoassays, immunoradiometric assays, gel diffusion precipitin reactions, immunodiffusion assays, in situ immunoassays (using colloidal gold, enzyme or radioisotope labels), western blot analysis, precipitation reactions, agglutination assays (e.g., gel agglutination assays, hemagglutination assays), complement fixation assays, immunofluorescence assays, protein A assays, immunoelectrophoresis assays, etc. In one embodiment, antibody binding is detected by detecting a label on the primary antibody. In another embodiment, the primary antibody is detected by detecting binding of a secondary antibody or reagent to the primary antibody. In a further embodiment, the secondary antibody is labeled. Many means are known in the art for detecting binding in an immunoassay and are within the scope of the present invention.

[0594] The expression of the component protein genes (both endogenous and those expressed from cloned DNA containing the genes) can be detected using techniques known in the art, including but not limited to Southern hybridization (Southern, 1975, J. Mol. Biol. 98:503-517), northern hybridization (see, e.g., Freeman et al., 1983, Proc. Natl. Acad. Sci. USA 80:4094-4098), restriction endonuclease mapping (Sambrook et al., 1989, Molecular Cloning, A Laboratory Manual, 2^{nd} Ed. Cold Spring Harbor Laboratory Press, New York), RNase protection assays (Current Protocols in Molecular Biology, John Wiley and Sons, New York, 1997), DNA sequence analysis, and polymerase chain reaction amplification (PCR; U.S. Pat. Nos. 4,683,202, 4,683,195, and 4,889,818; Gyllenstein et al., 1988, Proc. Natl. Acad. Sci. USA 85:7652-7657; Ochman et al., 1988, Genetics 120:621-623; Loh et al., 1989, Science 243:217-220) followed by Southern hybridization with probes specific for the component protein genes, in various cell types. Methods of amplification other than PCR commonly known in the art can be employed. In one embodiment, Southern hybridization can be used to detect genetic linkage of component protein gene mutations to physiological or pathological states. Various cell types, at various stages of development, can be characterized for their expression of component proteins at the same time and in the same cells. The stringency of the hybridization conditions for northern or Southern blot analysis can be manipulated to ensure detection of nucleic acids with the desired degree of relatedness to the specific probes used. Modifications to these methods and other methods commonly known in the art can be used.

[0595] Derivatives (e.g., fragments), homologs and analogs of one component protein can be assayed for binding to another component protein in the same complex by any method known in the art, for example the modified yeast matrix mating test described in Section “Screening for modulators of the protein complexes/proteins of the invention” infra, immunoprecipitation with an antibody that binds to the component protein complexed with other component proteins in the same complex, followed by size fractionation of the immunoprecipitated proteins (e.g., by denaturing or nondenaturing polyacrylamide gel electrophoresis), Western blot analysis, etc.

[0596] One embodiment of the invention provides a method for screening a derivative, homolog or analog of a component protein for biological activity comprising contacting said derivative, homolog or analog of the component protein with the other component proteins in the same complex; and detecting the formation of a complex between said derivative, homolog or analog of the component protein and the other component proteins; wherein detecting formation of said complex indicates that said derivative, homolog or analog of has biological (e.g., binding) activity.

[0597] The invention also provides methods of modulating the activity of a component protein that can participate in a protein complex by administration of a binding partner of that protein or derivative, homolog or analog thereof.

[0598] In a specific embodiment of the present invention, a protein complex of the present invention is administered to treat or prevent a disease or disorder, since the complex and/or component proteins have been implicated in the disease and disorder. Accordingly, a protein complex or a derivative, homolog, analog or fragment thereof, nucleic acids encoding the component proteins, anti-complex antibodies, and other modulators of protein complex activity, can be tested for activity in treating or preventing a disease or disorder in in vitro and in vivo assays.

[0599] In one embodiment, a therapeutic of the invention can be assayed for activity in treating or preventing a disease by contacting cultured cells that exhibit an indicator of the disease in vitro, with the therapeutic, and comparing the level of said indicator in the cells contacted with the therapeutic, with said level of said indicator in cells not so contacted, wherein a lower level in said contacted cells indicates that the therapeutic has activity in treating or preventing the disease.

[0600] In another embodiment of the invention, a therapeutic of the invention can be assayed for activity in treating or preventing a disease by administering the therapeutic to a test animal that is predisposed to develop symptoms of a disease, and measuring the change in said symptoms of the disease after administration of said therapeutic, wherein a reduction in the severity of the symptoms of the disease or prevention of the symptoms of the disease indicates that the therapeutic has activity in treating or preventing the disease. Such a test animal can be any one of a number of animal models known in the art for disease. These animal models are well known in the art. These animal models include, but are not limited to those which are listed in the section “Screening for modulators of the protein complexes/proteins of the invention” (infra) as exemplary animal models to study any of the complexes provided in the invention.

Screening for Modulators of the Protein Complexes/Proteins of the Invention

[0601] A complex of the present invention, the component proteins of the complex and nucleic acids encoding the component proteins, as well as derivatives and fragments of the amino and nucleic acids, can be used to screen for compounds that bind to, or modulate the amount of, activity of, or protein component composition of, said complex, and thus, have potential use as modulators, i.e., agonists or antagonists, of complex activity, and/or complex formation, i.e., the amount of complex formed, and/or protein component composition of the complex.

[0602] Thus, the present invention is also directed to methods for screening for molecules that bind to, or modulate the function of, amount of, activity of, formation of or protein component composition of, a complex of the present invention. In one embodiment of the invention, the method for screening for a molecule that modulates directly or indirectly the function, activity or formation of a complex of the present invention comprises exposing said complex, or a cell or organism containing the complex machinery, to one or more candidate molecules under conditions conducive to modulation; and determining the amount of, the biochemical activity of, protein components of, and/or intracellular localization of, said complex and/or the transcription level of a gene dependend on the complex and/or the abundance and/or activity of a protein or protein complex dependend on the function of the complex and/or product of a gene dependent on the complex in the presence of the one or more candidate molecules, wherein a change in said amount, activity, protein components or intracellular localization relative to said amount, activity, protein components and/or intracellular localization and/or a change in the transcription level of a gene dependend on the complex and/or the abundance and/or activity of a protein or protein complex dependent on the function of the complex and/or product of a gene dependent on the complex in the absence of said candidate molecules indicates that the molecule modulates function, activity or composition of said complex.

[0603] In a further specific embodiment, a modulation of the formation process of a complex can be determined.

[0604] Such a modulation can either be a change in the typical time course of its formation or a change in the typical steps leading to the formation of the complete complex.

[0605] Such changes can for example be detected by analysing and comparing the process of complex formation in untreated wild type cells of a particular type and/or cells showing or having the predisposition to develop a certain disease phenotype and/or cells which have been treated with particular conditions and/or particular agents in a particular situation.

[0606] Methods to study such changes in time course are well known in the art and include for example Western-blot analysis of the proteins in the complex isolated at different steps of its formation.

[0607] Furthermore an aberrant intracellular localization of the protein complex and/or an abberant transcription level of a gene dependent on the complex and/or the abundance and/or activity of a protein or protein complex dependent on the function of the complex and/or a gene dependent on the complex can serve as a marker for a disease and thus have diagnostic utility for any disease which is caused by an aberrant activity, function, composition or formation of the complex of the invention.

[0608] Methods to study the intracellular localization are well known in the art and include, but are not limited to immunofluorescence analysis using antibodies specific for components of the protein. Preferentially, double-stainings including staining of other cellular structures are being used to facilitate the detection of the intracellular localization. Methods to analyse the transcription levels of a gene dependent on the complex are also well known in the art and include Northern blot analysis, quantitative PCR etc. The abundance of proteins dependent on the protein can be analyzed as described supra. Methods to study changes in the activity of proteins dependent on complex depend on the protein. The choice of such methods will be apparent to any person skilled in the art.

[0609] In another embodiment, the present invention further relates to a process for the identification and/or preparation of an effector of the complex comprising the step of bringing into contact a product of any of claims 1 to 8 with a compound, a mixture or a library of compounds and determining whether the compound or a certain compound of the mixture or library binds to the product and/or effects the products biological activity and optionally further purifying the compound positively tested as effector.

[0610] In another embodiment, the present invention is directed to a method for screening for a molecule that binds a protein complex of the present invention comprising exposing said complex, or a cell or organism containing the complex machinery, to one or more candidate molecules; and determining whether said complex is bound by any of said candidate molecules. Such screening assays can be carried out using cell-free and cell-based methods that are commonly known in the art in vitro, in vivo or ex vivo. For example, an isolated complex can be employed, or a cell can be contacted with the candidate molecule and the complex can be isolated from such contacted cells and the isolated complex can be assayed for activity or component composition. In another example, a cell containing the complex can be contacted with the candidate molecule and the levels of the complex in the contacted cell can be measured. Additionally, such assays can be carried out in cells recombinantly expressing a component protein from the third column of table 1, or a functionally active fragment or functionally active derivative thereof, and a component protein from fourth column of table 1, or a functionally active fragment or functionally active derivative thereof. Additionally, such assays can also be carried out in cells recombinantly expressing all component proteins from the group of proteins in the fifth column of table 1.

[0611] For example, assays can be carried out using recombinant cells expressing the protein components of a complex, to screen for molecules that bind to, or interfere with, or promote complex activity or formation. In preferred embodiments, polypeptide derivatives that have superior stabilities but retain the ability to form a complex (e.g., one or more component proteins modified to be resistant to proteolytic degradation in the binding assay buffers, or to be resistant to oxidative degradation), are used to screen for modulators of complex activity or formation. Such resistant molecules can be generated, e.g., by substitution of amino acids at proteolytic cleavage sites, the use of chemically derivatized amino acids at proteolytic susceptible sites, and the replacement of amino acid residues subject to oxidation, i.e. methionine and cysteine.

[0612] A particular aspect of the present invention relates to identifying molecules that inhibit or promote formation or degradation of a complex of the present invention, e.g., using the method described for isolating the complex and identifying members of the complex using the TAP assay described in the Example-Section, infra, and in WO 00/09716 and Rigaut et al., 1999, Nature Biotechnol. 17:1030-1032, which are each incorporated by reference in their entirety.

[0613] In another embodiment of the invention, a modulator is identified by administering a candidate molecule to a transgenic non-human animal expressing the complex component proteins from promoters that are not the native promoters of the respective proteins, more preferably where the candidate molecule is also recombinantly expressed in the transgenic non-human animal. Alternatively, the method for identifying such a modulator can be carried out in vitro, preferably with a purified complex, and a purified candidate molecule.

[0614] Agents/molecules (candidate molecules) to be screened can be provided as mixtures of a limited number of specified compounds, or as compound libraries, peptide libraries and the like. Agents/molecules to be screened may also include all forms of antisera, antisense nucleic acids, etc., that can modulate complex activity or formation. Exemplary candidate molecules and libraries for screening are set forth in Section “Candidate molecules”, infra.

[0615] Screening the libraries can be accomplished by any of a variety of commonly known methods. See, e.g., the following references, which disclose screening of peptide libraries: Parmley and Smith, 1989, Adv. Exp. Med. Biol. 251:215-218; Scott and Smith, 1990, Science 249:386-390; Fowlkes et al., 1992, BioTechniques 13:422-427; Oldenburg et al., 1992, Proc. Natl. Acad. Sci. USA 89:5393-5397; Yu et al., 1994, Cell 76:933-945; Staudt et al., 1988, Science 241:577-580; Bock et al., 1992, Nature 355:564-566; Tuerk et al., 1992, Proc. Natl. Acad. Sci. USA 89:6988-6992; Ellington et al., 1992, Nature 355:850-852; U.S. Pat. No. 5,096,815, U.S. Pat. No. 5,223,409, and U.S. Pat. No. 5,198,346, all to Ladner et al.; Rebar and Pabo, 1993, Science 263:671-673; and International Patent Publication No. WO 94/18318.

[0616] In a specific embodiment, screening can be carried out by contacting the library members with a complex immobilized on a solid phase, and harvesting those library members that bind to the protein (or encoding nucleic acid or derivative). Examples of such screening methods, termed “panning” techniques, are described by way of example in Parmley and Smith, 1988, Gene 73:305-318; Fowlkes et al., 1992, BioTechniques 13:422-427; International Patent Publication No. WO 94/18318; and in references cited hereinabove.

[0617] In a specific embodiment, fragments and/or analogs of protein components of a complex, especially peptidomimetics, are screened for activity as competitive or non-competitive inhibitors of complex formation (amount of complex or composition of complex) or activity in the cell, which thereby inhibit complex activity or formation in the cell.

[0618] In one embodiment, agents that modulate (i.e., antagonize or agonize) complex activity or formation can be screened for using a binding inhibition assay, wherein agents are screened for their ability to modulate formation of a complex under aqueous, or physiological, binding conditions in which complex formation occurs in the absence of the agent to be tested. Agents that interfere with the formation of complexes of the invention are identified as antagonists of complex formation. Agents that promote the formation of complexes are identified as agonists of complex formation. Agents that completely block the formation of complexes are identified as inhibitors of complex formation.

[0619] Methods for screening may involve labeling the component proteins of the complex with radioligands (e.g., ¹²⁵I or ³H), magnetic ligands (e.g., paramagnetic beads covalently attached to photobiotin acetate), fluorescent ligands (e.g., fluorescein or rhodamine), or enzyme ligands (e.g., luciferase or □-galactosidase). The reactants that bind in solution can then be isolated by one of many techniques known in the art, including but not restricted to, co-immunoprecipitation of the labeled complex moiety using antisera against the unlabeled binding partner (or labeled binding partner with a distinguishable marker from that used on the second labeled complex moiety), immunoaffinity chromatography, size exclusion chromatography, and gradient density centrifugation. In a preferred embodiment, the labeled binding partner is a small fragment or peptidomimetic that is not retained by a commercially available filter. Upon binding, the labeled species is then unable to pass through the filter, providing for a simple assay of complex formation.

[0620] Methods commonly known in the art are used to label at least one of the component members of the complex. Suitable labeling methods include, but are not limited to, radiolabeling by incorporation of radiolabeled amino acids, e.g., ³H-leucine or ³⁵S-methionine, radiolabeling by post-translational iodination with ¹²⁵I or ¹³¹I using the chloramine T method, Bolton-Hunter reagents, etc., or labeling with ³²P using phosphorylase and inorganic radiolabeled phosphorous, biotin labeling with photobiotin-acetate and sunlamp exposure, etc. In cases where one of the members of the complex is immobilized, e.g., as described infra, the free species is labeled. Where neither of the interacting species is immobilized, each can be labeled with a distinguishable marker such that isolation of both moieties can be followed to provide for more accurate quantification, and to distinguish the formation of homomeric from heteromeric complexes. Methods that utilize accessory proteins that bind to one of the modified interactants to improve the sensitivity of detection, increase the stability of the complex, etc., are provided.

[0621] Typical binding conditions are, for example, but not by way of limitation, in an aqueous salt solution of 10-250 mM NaCl, 5-50 mM Tris-HCl, pH 5-8, and 0.5% Triton X-100 or other detergent that improves specificity of interaction. Metal chelators and/or divalent cations may be added to improve binding and/or reduce proteolysis. Reaction temperatures may include 4, 10, 15, 22, 25, 35, or 42 degrees Celsius, and time of incubation is typically at least 15 seconds, but longer times are preferred to allow binding equilibrium to occur. Particular complexes can be assayed using routine protein binding assays to determine optimal binding conditions for reproducible binding.

[0622] The physical parameters of complex formation can be analyzed by quantification of complex formation using assay methods specific for the label used, e.g., liquid scintillation counting for radioactivity detection, enzyme activity for enzyme-labeled moieties, etc. The reaction results are then analyzed utilizing Scatchard analysis, Hill analysis, and other methods commonly known in the arts (see, e.g., Proteins, Structures, and Molecular Principles, 2^{nd} Edition (1993) Creighton, Ed., W.H. Freeman and Company, New York).

[0623] In a second common approach to binding assays, one of the binding species is immobilized on a filter, in a microtiter plate well, in a test tube, to a chromatography matrix, etc., either covalently or non-covalently. Proteins can be covalently immobilized using any method well known in the art, for example, but not limited to the method of Kadonaga and Tjian, 1986, Proc. Natl. Acad. Sci. USA 83:5889-5893, i.e., linkage to a cyanogen-bromide derivatized substrate such as CNBr-Sepharose 4B (Pharmacia). Where needed, the use of spacers can reduce steric hindrance by the substrate. Non-covalent attachment of proteins to a substrate include, but are not limited to, attachment of a protein to a charged surface, binding with specific antibodies, binding to a third unrelated interacting protein, etc.

[0624] Assays of agents (including cell extracts or a library pool) for competition for binding of one member of a complex (or derivatives thereof) with another member of the complex labeled by any means (e.g., those means described above) are provided to screen for competitors or enhancers of complex formation.

[0625] In specific embodiments, blocking agents to inhibit non-specific binding of reagents to other protein components, or absorptive losses of reagents to plastics, immobilization matrices, etc., are included in the assay mixture. Blocking agents include, but are not restricted to bovine serum albumin, β-casein, nonfat dried milk, Denhardt's reagent, Ficoll, polyvinylpyrolidine, nonionic detergents (NP40, Triton X-100, Tween 20, Tween 80, etc.), ionic detergents (e.g., SDS, LDS, etc.), polyethylene glycol, etc. Appropriate blocking agent concentrations allow complex formation.

[0626] After binding is performed, unbound, labeled protein is removed in the supernatant, and the immobilized protein retaining any bound, labeled protein is washed extensively. The amount of bound label is then quantified using standard methods in the art to detect the label as described, supra.

[0627] In another specific embodiments screening for modulators of the protein complexes/protein as provided herein can be carried out by attaching those and/or the antibodies as provided herein to a solid carrier. In a further specific embodiment, the invention relates to an array of said molecules.

[0628] The preparation of such an array containing different types of proteins, including antibodies) is well known in the art and is apparent to a person skilled in the art (see e.g. Ekins et al., 1989, J. Pharm. Biomed. Anal. 7:155-168; Mitchell et al. 2002, Nature Biotechnol. 20:225-229; Petricoin et al., 2002, Lancet 359:572-577; Templin et al., 2001, Trends Biotechnol. 20:160-166; Wilson and Nock, 2001, Curr. Opin. Chem. Biol. 6:81-85; Lee et al., 2002 Science 295:1702-1705; MacBeath and Schreiber, 2000, Science 289:1760; Blawas and Reichert, 1998, Biomaterials 19:595; Kane et al., 1999, Biomaterials 20:2363; Chen et al., 1997, Science 276:1425; Vaugham et al., 1996, Nature Biotechnol. 14:309-314; Mahler et al., 1997, Immunotechnology 3:3143; Roberts et al., 1999, Curr. Opin. Chem. Biol. 3:268-273; Nord et al., 1997, Nature Biotechnol. 15:772-777; Nord et al., 2001, Eur. J. Biochem. 268:4269-4277; Brody and Gold, 2000, Rev. Mol. Biotechnol. 74:5-13; Karlstroem and Nygren, 2001, Anal. Biochem. 295:22-30; Nelson et al., 2000, Electrophoresis 21:1155-1163; Honore et al., 2001, Expert Rev. Mol. Diagn. 3:265-274; Albala, 2001, Expert Rev. Mol. Diagn. 2:145-152, Figeys and Pinto, 2001, Electrophoresis 2:208-216 and references in the publications listed here).

[0629] Complexes can be attached to an array by different means as will be apparent to a person skilled in the art. Complexes can for example be added to the array via a TAP-tag (as described in WO/0009716 and in Rigaut et al., 1999, Nature Biotechnol. 10:1030-1032) after the purification step or by another suitable purification scheme as will be apparent to a person skilled in the art.

[0630] Optionally, the proteins of the complex can be cross-linked to enhance the stability of the complex. Different methods to cross-link proteins are well known in the art. Reactive end-groups of cross-linking agents include but are not limited to —COOH, —SH, —NH2 or N-oxy-succinamate.

[0631] The spacer of the cross-linking agent should be chosen with respect to the size of the complex to be cross-linked. For small protein complexes, comprising only a few proteins, relatively short spacers are preferable in order to reduce the likelihood of cross-linking separate complexes in the reaction mixture. For larger protein complexes, additional use of larger spacers is preferable in order to facilitate cross-linking between proteins within the complex.

[0632] It is preferable to check the success-rate of cross-linking before linking the complex to the carrier.

[0633] As will be apparent to a person skilled in the art, the optimal rate of cross-linking need to be determined on a case by case basis. This can be achieved by methods well known in the art, some of which are exemplary described below.

[0634] A sufficient rate of cross-linking can be checked f.e. by analysing the cross-linked complex vs. a non-cross-linked complex on a denaturating protein gel.

[0635] If cross-linking has been performed successfully, the proteins of the complex are expected to be found in the same lane, whereas the proteins of the non-cross-linked complex are expected to be separated according to their individual characteristics. Optionally the presence of all proteins of the complex can be further checked by peptide-sequencing of proteins in the respective bands using methods well known in the art such as mass spectrometry and/or Edman degradation.

[0636] In addition, a rate of crosslinking which is too high should also be avoided. If cross-linking has been carried out too extensively, there will be an increasing amount of cross-linking of the individual protein complex, which potentially interferes with a screening for potential binding partners and/or modulators etc. using the arrays.

[0637] The presence of such structures can be determined by methods well known in the art and include e.g. gel-filtration experiments comparing the gel filtration profile solutions containing cross-linked complexes vs. uncross-linked complexes.

[0638] Optionally, functional assays as will be apparent to a person skilled in the art, some of which are exemplarily provided herein, can be performed to check the integrity of the complex.

[0639] Alternatively, members of the protein complex can be expressed as a single fusion protein and coupled to the matrix as will be apparent to a person skilled in the art.

[0640] Optionally, the attachment of the complex or proteins or antibody as outlined above can be further monitored by various methods apparent to a person skilled in the art. Those include, but are not limited to surface plasmon resonance (see e.g. McDonnel, 2001, Curr. Opin. Chem. Biol. 5:572-577; Lee, 2001, Trends Biotechnol. 19:217-222; Weinberger et al., 2000, 1:395-416; Pearson et al., 2000, Ann. Clin. Biochem. 37:119-145; Vely et al., 2000, Methods Mol. Biol. 121:313-321; Slepak, 2000, J. Mol. Recognit. 13:20-26.

[0641] Exemplary assays useful for measuring the production of Abeta-40 and Abeta-42 peptides by ELISA (e.g. by modifying the expression of one or several interacting proteins in cells by means of RNAi (siRNA) and/or plasmids encoding the interacting protein(s)) of the Presenilin 2 complex, Nicastrin complex, BACE1-complex, PTK7-complex, include but are not limited to those described in Vassar R et al., 1999, Science, 286:735-41.

[0642] Exemplary assays useful for measuring the production of C-terminal APP fragments in cell lines or transgenic animals by western blot (e.g. by modifying the expression of one or several interacting proteins in cells by means of RNAi (siRNA) and/or plasmids encoding the interacting protein(s)) of the Presenilin 2 complex, Nicastrin complex, BACE1-complex, PTK7-complex include but are not limited to those described in Yan R et al., 1999, Nature, 402:533-7.

[0643] Exemplary assays useful for measuring the proteolytic activity of beta- or gamma secretases towards bacterially expressed APP fragments in vitro (e.g. by modifying the expression of one or several interacting proteins in cells by means of RNAi (siRNA) and/or plasmids encoding the interacting protein(s)) of the Presenilin 2 complex, Nicastrin complex, BACE1-complex, PTK7-complex include but are not limited to those described in Tian G et al., 2002, J Biol Chem, 277:31499-505.

[0644] Exemplary assays useful for measuring transactivation of a Gal4-driven reporter gene (e.g. by modifying the expression of one or several interacting proteins in cells by means of RNAi (siRNA) and/or plasmids encoding the interacting protein(s)) of the Presenilin 2 complex, Nicastrin complex, PTK7-complex, BACE1-complex, include but are not limited to those described in Cao X et al., 2001, Science, 293:115-20.

Candidate Molecules

[0645] Any molecule known in the art can be tested for its ability to modulate (increase or decrease) the amount of, activity of, or protein component composition of a complex of the present invention as detected by a change in the amount of, activity of, or protein component composition of, said complex. By way of example, a change in the amount of the complex can be detected by detecting a change in the amount of the complex that can be isolated from a cell expressing the complex machinery. For identifying a molecule that modulates complex activity, candidate molecules can be directly provided to a cell expressing the complex machinery, or, in the case of candidate proteins, can be provided by providing their encoding nucleic acids under conditions in which the nucleic acids are recombinantly expressed to produce the candidate proteins within the cell expressing the complex machinery, the complex is then isolated from the cell and the isolated complex is assayed for activity using methods well known in the art, not limited to those described, supra.

[0646] This embodiment of the invention is well suited to screen chemical libraries for molecules which modulate, e.g., inhibit, antagonize, or agonize, the amount of, activity of, or protein component composition of the complex. The chemical libraries can be peptide libraries, peptidomimetic libraries, chemically synthesized libraries, recombinant, e.g., phage display libraries, and in vitro translation-based libraries, other non-peptide synthetic organic libraries, etc.

[0647] Exemplary libraries are commercially available from several sources (ArQule, Tripos/PanLabs, ChemDesign, Pharmacopoeia). In some cases, these chemical libraries are generated using combinatorial strategies that encode the identity of each member of the library on a substrate to which the member compound is attached, thus allowing direct and immediate identification of a molecule that is an effective modulator. Thus, in many combinatorial approaches, the position on a plate of a compound specifies that compound's composition. Also, in one example, a single plate position may have from 1-20 chemicals that can be screened by administration to a well containing the interactions of interest. Thus, if modulation is detected, smaller and smaller pools of interacting pairs can be assayed for the modulation activity. By such methods, many candidate molecules can be screened.

[0648] Many diversity libraries suitable for use are known in the art and can be used to provide compounds to be tested according to the present invention. Alternatively, libraries can be constructed using standard methods. Chemical (synthetic) libraries, recombinant expression libraries, or polysome-based libraries are exemplary types of libraries that can be used.

[0649] The libraries can be constrained or semirigid (having some degree of structural rigidity), or linear or nonconstrained. The library can be a cDNA or genomic expression library, random peptide expression library or a chemically synthesized random peptide library, or non-peptide library. Expression libraries are introduced into the cells in which the assay occurs, where the nucleic acids of the library are expressed to produce their encoded proteins.

[0650] In one embodiment, peptide libraries that can be used in the present invention may be libraries that are chemically synthesized in vitro. Examples of such libraries are given in Houghten et al., 1991, Nature 354:84-86, which describes mixtures of free hexapeptides in which the first and second residues in each peptide were individually and specifically defined; Lam et al., 1991, Nature 354:82-84, which describes a “one bead, one peptide” approach in which a solid phase split synthesis scheme produced a library of peptides in which each bead in the collection had immobilized thereon a single, random sequence of amino acid residues; Medynski, 1994, Bio/Technology 12:709-710, which describes split synthesis and T-bag synthesis methods; and Gallop et al., 1994, J. Med. Chem. 37:1233-1251. Simply by way of other examples, a combinatorial library may be prepared for use, according to the methods of Ohlmeyer et al., 1993, Proc. Natl. Acad. Sci. USA 90:10922-10926; Erb et al., 1994, Proc. Natl. Acad. Sci. USA 91:11422-11426; Houghten et al., 1992, Biotechniques 13:412; Jayawickreme et al., 1994, Proc. Natl. Acad. Sci. USA 91:1614-1618; or Salmon et al., 1993, Proc. Natl. Acad. Sci. USA 90:11708-11712. PCT Publication No. WO 93/20242 and Brenner and Lerner, 1992, Proc. Natl. Acad. Sci. USA 89:5381-5383 describe “encoded combinatorial chemical libraries,” that contain oligonucleotide identifiers for each chemical polymer library member.

[0651] In a preferred embodiment, the library screened is a biological expression library that is a random peptide phage display library, where the random peptides are constrained (e.g., by virtue of having disulfide bonding).

[0652] Further, more general, structurally constrained, organic diversity (e.g., nonpeptide) libraries, can also be used. By way of example, a benzodiazepine library (see e.g., Bunin et al., 1994, Proc. Natl. Acad. Sci. USA 91:4708-4712) may be used.

[0653] Conformationally constrained libraries that can be used include but are not limited to those containing invariant cysteine residues which, in an oxidizing environment, cross-link by disulfide bonds to form cystines, modified peptides (e.g., incorporating fluorine, metals, isotopic labels, are phosphorylated, etc.), peptides containing one or more non-naturally occurring amino acids, non-peptide structures, and peptides containing a significant fraction of -carboxyglutamic acid.

[0654] Libraries of non-peptides, e.g., peptide derivatives (for example, that contain one or more non-naturally occurring amino acids) can also be used. One example of these are peptoid libraries (Simon et al., 1992, Proc. Natl. Acad. Sci. USA 89:9367-9371). Peptoids are polymers of non-natural amino acids that have naturally occurring side chains attached not to the □ carbon but to the backbone amino nitrogen. Since peptoids are not easily degraded by human digestive enzymes, they are advantageously more easily adaptable to drug use. Another example of a library that can be used, in which the amide functionalities in peptides have been permethylated to generate a chemically transformed combinatorial library, is described by Ostresh et al., 1994, Proc. Natl. Acad. Sci. USA 91:11138-11142).

[0655] The members of the peptide libraries that can be screened according to the invention are not limited to containing the 20 naturally occurring amino acids. In particular, chemically synthesized libraries and polysome based libraries allow the use of amino acids in addition to the 20 naturally occurring amino acids (by their inclusion in the precursor pool of amino acids used in library production). In specific embodiments, the library members contain one or more non-natural or non-classical amino acids or cyclic peptides. Non-classical amino acids include but are not limited to the D-isomers of the common amino acids, -amino isobutyric acid, 4-aminobutyric acid, Abu, 2-amino butyric acid; .-Abu, .-Ahx, 6-amino hexanoic acid; Aib, 2-amino isobutyric acid; 3-amino propionic acid; ornithine; norleucine; norvaline, hydroxyproline, sarcosine, citrulline, cysteic acid, t-butylglycine, t-butylalanine, phenylglycine, cyclohexylalanine, β-alanine, designer amino acids such as β-methyl amino acids, [symbol] -methyl amino acids, [symbol] -methyl amino acids, fluoro-amino acids and amino acid analogs in general. Furthermore, the amino acid can be D (dextrorotary) or L (levorotary).

[0656] In a specific embodiment, fragments and/or analogs of complexes of the invention, or protein components thereof, especially peptidomimetics, are screened for activity as competitive or non-competitive inhibitors of complex activity or formation.

[0657] In another embodiment of the present invention, combinatorial chemistry can be used to identify modulators of a the complexes. Combinatorial chemistry is capable of creating libraries containing hundreds of thousands of compounds, many of which may be structurally similar. While high throughput screening programs are capable of screening these vast libraries for affinity for known targets, new approaches have been developed that achieve libraries of smaller dimension but which provide maximum chemical diversity. (See e.g., Matter, 1997, J. Med. Chem. 40:1219-1229).

[0658] One method of combinatorial chemistry, affinity fingerprinting, has previously been used to test a discrete library of small molecules for binding affinities for a defined panel of proteins. The fingerprints obtained by the screen are used to predict the affinity of the individual library members for other proteins or receptors of interest (in the instant invention, the protein complexes of the present invention and protein components thereof.) The fingerprints are compared with fingerprints obtained from other compounds known to react with the protein of interest to predict whether the library compound might similarly react. For example, rather than testing every ligand in a large library for interaction with a complex or protein component, only those ligands having a fingerprint similar to other compounds known to have that activity could be tested. (See, e.g., Kauvar et al., 1995, Chem. Biol. 2:107-118; Kauvar, 1995, Affinity fingerprinting, Pharmaceutical Manufacturing International. 8:25-28; and Kauvar, Toxic-Chemical Detection by Pattern Recognition in New Frontiers in Agrochemical Immunoassay, Kurtz, Stanker and Skerritt (eds), 1995, AOAC: Washington, D.C., 305-312).

[0659] Kay et al. (1993, Gene 128:59-65) disclosed a method of constructing peptide libraries that encode peptides of totally random sequence that are longer than those of any prior conventional libraries. The libraries disclosed in Kay et al. encode totally synthetic random peptides of greater than about 20 amino acids in length. Such libraries can be advantageously screened to identify complex modulators. (See also U.S. Pat. No. 5,498,538 dated Mar. 12, 1996; and PCT Publication No. WO 94/18318 dated Aug. 18, 1994).

[0660] A comprehensive review of various types of peptide libraries can be found in Gallop et al., 1994, J. Med. Chem. 37:1233-1251.

Pharmaceutical Compositions and Therapeutic/Prophylactic Administration

[0661] The invention provides methods of treatment (and prophylaxis) by administration to a subject of an effective amount of a therapeutic of the invention. In a preferred aspect, the therapeutic is substantially purified. The subject is preferably an animal including, but not limited to animals such as cows, pigs, horses, chickens, cats, dogs, etc., and is preferably a mammal, and most preferably human. In a specific embodiment, a non-human mammal is the subject.

[0662] Various delivery systems are known and can be used to administer a therapeutic of the invention, e.g., encapsulation in liposomes, microparticles, and microcapsules: use of recombinant cells capable of expressing the therapeutic, use of receptor-mediated endocytosis (e.g., Wu and Wu, 1987, J. Biol. Chem. 262:4429-4432); construction of a therapeutic nucleic acid as part of a retroviral or other vector, etc. Methods of introduction include but are not limited to intradermal, intramuscular, intraperitoneal, intravenous, subcutaneous, intranasal, epidural, and oral routes. The compounds may be administered by any convenient route, for example by infusion, by bolus injection, by absorption through epithelial or mucocutaneous linings (e.g., oral, rectal and intestinal mucosa, etc.), and may be administered together with other biologically active agents. Administration can be systemic or local. In addition, it may be desirable to introduce the pharmaceutical compositions of the invention into the central nervous system by any suitable route, including intraventricular and intrathecal injection; intraventricular injection may be facilitated by an intraventricular catheter, for example, attached to a reservoir, such as an Ommaya reservoir. Pulmonary administration can also be employed, e.g., by use of an inhaler or nebulizer, and formulation with an aerosolizing agent.

[0663] In a specific embodiment, it may be desirable to administer the pharmaceutical compositions of the invention locally to the area in need of treatment. This may be achieved by, for example, and not by way of limitation, local infusion during surgery, topical application, e.g., in conjunction with a wound dressing after surgery, by injection, by means of a catheter, by means of a suppository, or by means of an implant, said implant being of a porous, non-porous, or gelatinous material, including membranes, such as sialastic membranes, or fibers. In one embodiment, administration can be by direct injection at the site (or former site) of a malignant tumor or neoplastic or pre-neoplastic tissue.

[0664] In another embodiment, the therapeutic can be delivered in a vesicle, in particular a liposome (Langer, 1990, Science 249:1527-1533; Treat et al., 1989, In: Liposomes in the Therapy of Infectious Disease and Cancer, Lopez-Berestein and Fidler, eds., Liss, New York, pp. 353-365; Lopez-Berestein, ibid., pp. 317-327; see generally ibid.)

[0665] In yet another embodiment, the therapeutic can be delivered via a controlled release system. In one embodiment, a pump may be used (Langer, supra; Sefton, 1987, CRC Crit. Ref. Biomed. Eng. 14:201-240; Buchwald et al., 1980, Surgery 88:507-516; Saudek et al., 1989, N. Engl. J. Med. 321:574-579). In another embodiment, polymeric materials can be used (Medical Applications of Controlled Release, Langer and Wise, eds., CRC Press, Boca Raton, Fla., 1974; Controlled Drug Bioavailability, Drug Product Design and Performance, Smolen and Ball, eds., Wiley, New York, 1984; Ranger and Peppas, 1983, Macromol. Sci. Rev. Macromol. Chem. 23:61; Levy et al., 1985, Science 228:190-192; During et al., 1989, Ann. Neurol. 25:351-356; Howard et al., 1989, J. Neurosurg. 71:858-863). In yet another embodiment, a controlled release system can be placed in proximity of the therapeutic target, i.e., the brain, thus requiring only a fraction of the systemic dose (e.g., Goodson, 1984, In: Medical Applications of Controlled Release, supra, Vol. 2, pp. 115-138). Other controlled release systems are discussed in the review by Langer (1990, Science 249:1527-1533).

[0666] In a specific embodiment where the therapeutic is a nucleic acid encoding a protein therapeutic, the nucleic acid can be administered in vivo to promote expression of its encoded protein, by constructing it as part of an appropriate nucleic acid expression vector and administering it so that it becomes intracellular, e.g., by use of a retroviral vector (U.S. Pat. No. 4,980,286), or by direct injection, or by use of microparticle bombardment (e.g., a gene gun; Biolistic, Dupont), or by coating it with lipids, cell-surface receptors or transfecting agents, or by administering it in linkage to a homeobox-like peptide which is known to enter the nucleus (e.g., Joliot et al., 1991, Proc. Natl. Acad. Sci. USA 88:1864-1868), etc. Alternatively, a nucleic acid therapeutic can be introduced intracellularly and incorporated by homologous recombination within host cell DNA for expression.

[0667] The present invention also provides pharmaceutical compositions. Such compositions comprise a therapeutically effective amount of a therapeutic, and a pharmaceutically acceptable carrier. In a specific embodiment, the term “pharmaceutically acceptable” means approved by a regulatory agency of the Federal or a state government or listed in the U.S. Pharmacopeia or other generally recognized pharmacopeia for use in animals, and more particularly, in humans. The term “carrier” refers to a diluent, adjuvant, excipient, or vehicle with which the therapeutic is administered. Such pharmaceutical carriers can be sterile liquids, such as water and oils, including those of petroleum, animal, vegetable or synthetic origin, including but not limited to peanut oil, soybean oil, mineral oil, sesame oil and the like. Water is a preferred carrier when the pharmaceutical composition is administered orally. Saline and aqueous dextrose are preferred carriers when the pharmaceutical composition is administered intravenously. Saline solutions and aqueous dextrose and glycerol solutions are preferably employed as liquid carriers for injectable solutions. Suitable pharmaceutical excipients include starch, glucose, lactose, sucrose, gelatin, malt, rice, flour, chalk, silica gel, sodium stearate, glycerol monostearate, talc, sodium chloride, dried skim milk, glycerol, propylene, glycol, water, ethanol and the like. The composition, if desired, can also contain minor amounts of wetting or emulsifying agents, or pH buffering agents. These compositions can take the form of solutions, suspensions, emulsions, tablets, pills, capsules, powders, sustained-release formulations and the like. The composition can be formulated as a suppository, with traditional binders and carriers such as triglycerides. Oral formulation can include standard carriers such as pharmaceutical grades of mannitol, lactose, starch, magnesium stearate, sodium saccharine, cellulose, magnesium carbonate, etc. Examples of suitable pharmaceutical carriers are described in “Remington's Pharmaceutical Sciences” by E. W. Martin. Such compositions will contain a therapeutically effective amount of the therapeutic, preferably in purified form, together with a suitable amount of carrier so as to provide the form for proper administration to the patient. The formulation should suit the mode of administration.

[0668] In a preferred embodiment, the composition is formulated, in accordance with routine procedures, as a pharmaceutical composition adapted for intravenous administration to human beings. Typically, compositions for intravenous administration are solutions in sterile isotonic aqueous buffer. Where necessary, the composition may also include a solubilizing agent and a local anesthetic such as lidocaine to ease pain at the site of the injection. Generally, the ingredients are supplied either separately or mixed together in unit dosage form, for example, as a dry lyophilized powder or water-free concentrate in a hermetically sealed container such as an ampoule or sachette indicating the quantity of active agent. Where the composition is to be administered by infusion, it can be dispensed with an infusion bottle containing sterile pharmaceutical grade water or saline. Where the composition is administered by injection, an ampoule of sterile water or saline for injection can be provided so that the ingredients may be mixed prior to administration.

[0669] The therapeutics of the invention can be formulated as neutral or salt forms. Pharmaceutically acceptable salts include those formed with free carboxyl groups such as those derived from hydrochloric, phosphoric, acetic, oxalic, tartaric acids, etc., those formed with free amine groups such as those derived from isopropylamine, triethylamine, 2-ethylamino ethanol, histidine, procaine, etc., and those derived from sodium, potassium, ammonium, calcium, and ferric hydroxides, etc.

[0670] The amount of the therapeutic of the invention which will be effective in the treatment of a particular disorder or condition will depend on the nature of the disorder or condition, and can be determined by standard clinical techniques. In addition, in vitro assays may optionally be employed to help identify optimal dosage ranges. The precise dose to be employed in the formulation will also depend on the route of administration, and the seriousness of the disease or disorder, and should be decided according to the judgment of the practitioner and each patient's circumstances. However, suitable dosage ranges for intravenous administration are generally about 20-500 micrograms of active compound per kilogram body weight. Suitable dosage ranges for intranasal administration are generally about 0.01 pg/kg body weight to 1 mg/kg body weight. Effective doses may be extrapolated from dose-response curves derived from in vitro or animal model test systems.

[0671] Suppositories generally contain active ingredient in the range of 0.5% to 10% by weight; oral formulations preferably contain 10% to 95% active ingredient.

[0672] The invention also provides a pharmaceutical pack or kit comprising one or more containers filled with one or more of the ingredients of the pharmaceutical compositions of the invention. Optionally associated with such container(s) can be a notice in the form prescribed by a governmental agency regulating the manufacture, use or sale of pharmaceuticals or biological products, which notice reflects approval by the agency of manufacture, use or sale for human administration.

[0673] The invention also provides a pharmaceutical pack or kit comprising one or more containers filled with one or more of the ingredients of the pharmaceutical compositions of the invention. For example, the kit can comprise in one or more containers a first protein, or a functionally active fragment or functionally active derivative thereof, which first protein is selected from the group consisting of proteins listed in the third column of table 1; and a second protein, or a functionally active fragment or functionally active derivative thereof, which second protein is selected from the group consisting of proteins listed in the fourth column of table 1.

[0674] Alternatively, the kit can comprise in one or more containers, all proteins, functionally active fragments or functionally active derivatives thereof of from the group of proteins in the fifth column of table 1.

[0675] The kits of the present invention can also contain expression vectors encoding the essential components of the complex machinery, which components after being expressed can be reconstituted in order to form a biologically active complex. Such a kit preferably also contains the required buffers and reagents. Optionally associated with such container(s) can be instructions for use of the kit and/or a notice in the form prescribed by a governmental agency regulating the manufacture, use or sale of pharmaceuticals or biological products, which notice reflects approval by the agency of manufacture, use or sale for human administration.

Animal Models

[0676] The present invention also provides animal models. In one embodiment, animal models for diseases and disorders involving the protein complexes of the present invention are provided. These animal models are well known in the art. These animal models include, but are not limited to those which are listed in the section “Screening for modulators of the protein complexes/proteins of the invention” (supra) as exemplary animald models to study any of the complexes provided in the invention. Such animals can be initially produced by promoting homologous recombination or insertional mutagenesis between genes encoding the protein components of the complexes in the chromosome, and exogenous genes encoding the protein components of the complexes that have been rendered biologically inactive or deleted (preferably by insertion of a heterologous sequence, e.g., an antibiotic resistance gene). In a preferred aspect, homologous recombination is carried out by transforming embryo-derived stem (ES) cells with one or more vectors containing one or more insertionally inactivated genes, such that homologous recombination occurs, followed by injecting the transformed ES cells into a blastocyst, and implanting the blastocyst into a foster mother, followed by the birth of the chimeric animal (“knockout animal”) in which a gene encoding a component protein from the third column of table 1, or a functionally active fragment or functionally active derivative thereof, and a gene encoding a component protein from the fourth column of table 1, or a functionally active fragment or functionally active derivative thereof, has been inactivated or deleted (Capecchi, 1989, Science 244:1288-1292).

[0677] In another preferred aspect, homologous recombination is carried out by transforming embryo-derived stem (ES) cells with one or more vectors containing one or more insertionally inactivated genes, such that homologous recombination occurs, followed by injecting the transformed ES cells into a blastocyst, and implanting the blastocyst into a foster mother, followed by the birth of the chimeric animal (“knockout animal”) in which the genes of all component proteins from the group of proteins listed in the third column of table 1 or of all proteins from the group of proteins listed in the forth column of table 1 have been inactivated or deleted.

[0678] The chimeric animal can be bred to produce additional knockout animals. Such animals can be mice, hamsters, sheep, pigs, cattle, etc., and are preferably non-human mammals. In a specific embodiment, a knockout mouse is produced.

[0679] Such knockout animals are expected to develop, or be predisposed to developing, diseases or disorders associated with mutations involving the protein complexes of the present invention, and thus, can have use as animal models of such diseases and disorders, e.g., to screen for or test molecules (e.g., potential therapeutics) for such diseases and disorders.

[0680] In a different embodiment of the invention, transgenic animals that have incorporated and express (or over-express or mis-express) a functional gene encoding a protein component of the complex, e.g. by introducing the a gene encoding one or more of the components of the complex under the control of a heterologous promoter (i.e., a promoter that is not the native promoter of the gene) that either over-expresses the protein or proteins, or expresses them in tissues not normally expressing the complexes or proteins, can have use as animal models of diseases and disorders characterized by elevated levels of the protein complexes. Such animals can be used to screen or test molecules for the ability to treat or prevent the diseases and disorders cited supra.

[0681] In one embodiment, the present invention provides a recombinant non-human animal in which an endogenous gene encoding a first protein, or a functionally active fragment or functionally active derivative thereof, which first protein is selected

[0682] from the group of proteins listed in the third column of table 1, and and endogenous gene encoding a second protein, or a functionally active fragment or functionally active derivative thereof, which second protein is selected from the group consisting of proteins listed in the fourth column of table 1 has been deleted or inactivated by homologous recombination or insertional mutagenesis of said animal or an ancestor thereof. In addition, the present invention provides a recombinant non-human animal in which the endogenous genes of all proteins, or functionally active fragments or functionally active derivatives thereof of one of the group of proteins listed in the fifth column have been deleted or inactivated by homologous recombination or insertional mutagenesis of said animal or an ancestor thereof:

[0683] In another embodiment, the present invention provides a recombinant non-human animal in which an endogenous gene encoding a first protein, or a functionally active fragment or functionally active derivative thereof, which first protein is selected from the group consisting of proteins of the third column of table 1, and endogenous gene encoding a second protein, or a functionally active fragment or functionally active derivative thereof, which second protein is selected from the group consisting of proteins of the fourth column, of table 1 are recombinantly expressed in said animal or an ancestor thereof.

[0684] The invention further relates the following embodiments, to which the definitions, explanations and indications as given above also apply:

[0685] Embodiments relating to the Nicastrin complex (a):

1. A protein complex selected from complex (l) and comprising

(a) at least one first protein selected from the group consisting of:

[0686] (i) “Aph-1a” (SEQ ID No:1) or a functionally active derivative thereof, or a functionally active fragment thereof, or a homologue thereof, or a variant of “Aph-1a” encoded by a nucleic acid that hybridizes to the “Aph-1a” nucleic acid or its complement under low stringency conditions,

[0687] (ii) “BACE1” (SEQ ID No:68) or a functionally active derivative thereof, or a functionally active fragment thereof, or a homologue thereof, or a variant of “BACE1” encoded by a nucleic acid that hybridizes to the “BACE1” nucleic acid or its complement under low stringency conditions,

[0688] (iii) “Nicastrin” (SEQ ID No:9) or a functionally active derivative thereof, or a functionally active fragment thereof, or a homologue thereof, or a variant of “Nicastrin” encoded by a nucleic acid that hybridizes to the “Nicastrin” nucleic acid or its complement under low stringency conditions,

[0689] (iv) “Pen-2” (SEQ ID No:10) or a functionally active derivative thereof, or a functionally active fragment thereof, or a homologue thereof, or a variant of “Pen-2” encoded by a nucleic acid that hybridizes to the “Pen-2” nucleic acid or its complement under low stringency conditions,

[0690] (v) “Presenilin-1” (SEQ ID No:14) or a functionally active derivative thereof, or a functionally active fragment thereof, or a homologue thereof, or a variant of “Presenilin-1” encoded by a nucleic acid that hybridizes to the “Presenilin-1” nucleic acid or its complement under low stringency conditions, and

[0691] (vi) “Presenilin-2” (SEQ ID No:66) or a functionally active derivative thereof, or a functionally active fragment thereof, or a homologue thereof, or a variant of “Presenilin-2” encoded by a nucleic acid that hybridizes to the “Presenilin-2” nucleic acid or its complement under low stringency conditions, and

(b) at least one second protein, which second protein is selected from the group consisting of:

[0692] (i) “18 kDa microsomal signal peptidase subunit” (SEQ ID No:53) or a functionally active derivative thereof, or a functionally active fragment thereof, or a homologue thereof, or a variant of “18 kDa microsomal signal peptidase subunit” encoded by a nucleic acid that hybridizes to the “18 kDa microsomal signal peptidase subunit” nucleic acid or its complement under low stringency conditions,

[0693] (ii) “25 kDa microsomal signal peptidase subunit” (SEQ ID No:119) or a functionally active derivative thereof, or a functionally active fragment thereof, or a homologue thereof, or a variant of “25 kDa microsomal signal peptidase subunit” encoded by a nucleic acid that hybridizes to the “25 kDa microsomal signal peptidase subunit” nucleic acid or its complement under low stringency conditions,

[0694] (iii) “ATP-binding cassette, sub-family A, member 3” (SEQ ID No:103) or a functionally active derivative thereof, or a functionally active fragment thereof, or a homologue thereof, or a variant of “ATP-binding cassette, sub-family A, member 3” encoded by a nucleic acid that hybridizes to the “ATP-binding cassette, subfamily A, member 3” nucleic acid or its complement under low stringency conditions,

[0695] (iv) “BSCv protein” (SEQ ID No:70) or a functionally active derivative thereof, or a functionally active fragment thereof, or a homologue thereof, or a variant of “BSCv protein” encoded by a nucleic acid that hybridizes to the “BSCv protein” nucleic acid or its complement under low stringency conditions,

[0696] (v) “CGI-13” (SEQ ID No:72) or a functionally active derivative thereof, or a functionally active fragment thereof, or a homologue thereof, or a variant of “CGI-13” encoded by a nucleic acid that hybridizes to the “CGI-13” nucleic acid or its complement under low stringency conditions,

[0697] (vi) “Casein kinase II beta chain” (SEQ ID No:74) or a functionally active derivative thereof, or a functionally active fragment thereof, or a homologue thereof, or a variant of “Casein kinase II beta chain” encoded by a nucleic acid that hybridizes to the “Casein kinase II beta chain” nucleic acid or its complement under low stringency conditions,

[0698] (vii) “Cathepsin B” (SEQ ID No:75) or a functionally active derivative thereof, or a functionally active fragment thereof, or a homologue thereof, or a variant of “Cathepsin B” encoded by a nucleic acid that hybridizes to the “Cathepsin B” nucleic acid or its complement under low stringency conditions,

[0699] (viii) “Delta-6 fatty acid desaturase” (SEQ ID No:76) or a functionally active derivative thereof, or a functionally active fragment thereof, or a homologue thereof, or a variant of “Delta-6 fatty acid desaturase” encoded by a nucleic acid that hybridizes to the “Delta-6 fatty acid desaturase” nucleic acid or its complement under low stringency conditions,

[0700] (ix) “ENSG00000144840” (SEQ ID No:79) or a functionally active derivative thereof, or a functionally active fragment thereof, or a homologue thereof, or a variant of “ENSG10000144840” encoded by a nucleic acid that hybridizes to the “ENSG00000144840” nucleic acid or its complement under low stringency conditions,

[0701] (x) “FLJ13977” (SEQ ID No:81) or a functionally active derivative thereof, or a functionally active fragment thereof, or a homologue thereof, or a variant of “FLJ13977” encoded by a nucleic acid that hybridizes to the “FLJ13977” nucleic acid or its complement under low stringency conditions,

[0702] (xi) “FLJ20342” (SEQ ID No:56) or a functionally active derivative thereof, or a functionally active fragment thereof, or a homologue thereof, or a variant of “FLJ20342” encoded by a nucleic acid that hybridizes to the “FLJ20342” nucleic acid or its complement under low stringency conditions,

[0703] (xii) “FLJ20481” (SEQ ID No:82) or a functionally active derivative thereof, or a functionally active fragment thereof, or a homologue thereof, or a variant of “FLJ20481” encoded by a nucleic acid that hybridizes to the “FLJ20481” nucleic acid or its complement under low stringency conditions,

[0704] (xiii) “FLJ22390” (SEQ ID No:84) or a functionally active derivative thereof, or a functionally active fragment thereof, or a homologue thereof, or a variant of “FLJ22390” encoded by a nucleic acid that hybridizes to the “FLJ22390” nucleic acid or its complement under low stringency conditions,

[0705] (xiv) “Hypothetical protein tyrosine phosphatase ensg00000149185” (SEQ ID No:86) or a functionally active derivative thereof, or a functionally active fragment thereof, or a homologue thereof, or a variant of “Hypothetical protein tyrosine phosphatase ensg00000149185” encoded by a nucleic acid that hybridizes to the “Hypothetical protein tyrosine phosphatase ensg00000149185” nucleic acid or its complement under low stringency conditions,

[0706] (xv) “ICAM-2” (SEQ ID No:87) or a functionally active derivative thereof, or a functionally active fragment thereof, or a homologue thereof, or a variant of “ICAM-2” encoded by a nucleic acid that hybridizes to the “ICAM-2” nucleic acid or its complement under low stringency conditions,

[0707] (xvi) “KIAA1181” (SEQ ID No:88) or a functionally active derivative thereof, or a functionally active fragment thereof, or a homologue thereof, or a variant of “KIAA1181” encoded by a nucleic acid that hybridizes to the “KIAA1181” nucleic acid or its complement under low stringency conditions,

[0708] (xvii) “KIAA1533” (SEQ ID No:89) or a functionally active derivative thereof, or a functionally active fragment thereof, or a homologue thereof, or a variant of “KIAA1533” encoded by a nucleic acid that hybridizes to the “KIAA1533” nucleic acid or its complement under low stringency conditions,

[0709] (xviii) “Mesenchymal stem cell protein DSCD75” (SEQ ID No:91) or a functionally active derivative thereof, or a functionally active fragment thereof, or a homologue thereof, or a variant of “Mesenchymal stem cell protein DSCD75” encoded by a nucleic acid that hybridizes to the “Mesenchymal stem cell protein DSCD75” nucleic acid or its complement under low stringency conditions,

[0710] (xix) “NICE-3” (SEQ ID No:58) or a functionally active derivative thereof, or a functionally active fragment thereof, or a homologue thereof, or a variant of “NICE-3” encoded by a nucleic acid that hybridizes to the “NICE-3” nucleic acid or its complement under low stringency conditions,

[0711] (xx) “Neurotrypsin” (SEQ ID No:92) or a functionally active derivative thereof, or a functionally active fragment thereof, or a homologue thereof, or a variant of “Neurotrypsin” encoded by a nucleic acid that hybridizes to the “Neurotrypsin” nucleic acid or its complement under low stringency conditions,

[0712] (xxi) “PP1, regulatory subunit 15B” (SEQ ID No:93) or a functionally active derivative thereof, or a functionally active fragment thereof, or a homologue thereof, or a variant of “PP1, regulatory subunit 15B” encoded by a nucleic acid that hybridizes to the “PP1, regulatory subunit 15B” nucleic acid or its complement under low stringency conditions,

[0713] (xxii) “Protein amplified in osteosarcoma (OS-9)” (SEQ ID No:94) or a functionally active derivative thereof, or a functionally active fragment thereof, or a homologue thereof, or a variant of “Protein amplified in osteosarcoma (OS-9)” encoded by a nucleic acid that hybridizes to the “Protein amplified in osteosarcoma (OS-9)” nucleic acid or its complement under low stringency conditions,

[0714] (xxiii) “Protein similar to stromal cell-derived factor 2” (SEQ ID No:95) or a functionally active derivative thereof, or a functionally active fragment thereof, or a homologue thereof, or a variant of “Protein similar to stromal cell-derived factor 2” encoded by a nucleic acid that hybridizes to the “Protein similar to stromal cell-derived factor 2” nucleic acid or its complement under low stringency conditions,

[0715] (xxiv) “Protocadherin beta 8” (SEQ ID No:96) or a functionally active derivative thereof, or a functionally active fragment thereof, or a homologue thereof, or a variant of “Protocadherin beta 8” encoded by a nucleic acid that hybridizes to the “Protocadherin beta 8” nucleic acid or its complement under low stringency conditions,

[0716] (xxv) “REP8 protein” (SEQ ID No:97) or a functionally active derivative thereof, or a functionally active fragment thereof, or a homologue thereof, or a variant of “REP8 protein” encoded by a nucleic acid that hybridizes to the “REP8 protein” nucleic acid or its complement under low stringency conditions,

[0717] (xxvi) “RING finger protein 5” (SEQ ID No:98) or a functionally active derivative thereof, or a functionally active fragment thereof, or a homologue thereof, or a variant of “RING finger protein 5” encoded by a nucleic acid that hybridizes to the “RING finger protein 5” nucleic acid or its complement under low stringency conditions,

[0718] (xxvii) “Retinal short-chain dehydrogenase/reductase retSDR2” (SEQ ID No:99) or a functionally active derivative thereof, or a functionally active fragment thereof, or a homologue thereof, or a variant of “Retinal short-chain dehydrogenase/reductase retSDR2” encoded by a nucleic acid that hybridizes to the “Retinal short-chain dehydrogenase/reductase retSDR2” nucleic acid or its complement under low stringency conditions,

[0719] (xxviii) “Stromal cell-derived factor 2-like 1” (SEQ ID No:100) or a functionally active derivative thereof, or a functionally active fragment thereof, or a homologue thereof, or a variant of “Stromal cell-derived factor 2-like 1” encoded by a nucleic acid that hybridizes to the “Stromal cell-derived factor 2-like 1” nucleic acid or its complement under low stringency conditions,

[0720] (xxix) “Thioredoxin domain-containing protein” (SEQ ID No:101) or a functionally active derivative thereof, or a functionally active fragment thereof, or a homologue thereof, or a variant of “Thioredoxin domain-containing protein” encoded by a nucleic acid that hybridizes to the “Thioredoxin domain-containing protein” nucleic acid or its complement under low stringency conditions, and

[0721] (xxx) “Voltage-dependent anion channel 1” (SEQ ID No:102) or a functionally active derivative thereof, or a functionally active fragment thereof, or a homologue thereof, or a variant of “Voltage-dependent anion channel 1” encoded by a nucleic acid that hybridizes to the “Voltage-dependent anion channel 1” nucleic acid or its complement under low stringency conditions, and a complex (II) comprising at least two of said second proteins, wherein said low stringency conditions comprise hybridization in a buffer comprising 35% formamide, 5×SSC, 50 mM Tris-HCI (pH 7.5), 5 mM EDTA, 0.02% PVP, 0.02% Ficoll, 0.2% BSA, 100 ug/ml denatured salmon sperm DNA, and 10% (wt/vol) dextran sulfate for 18-20 hours at 40° C., washing in a buffer consisting of 2×SSC, 25 mM Tris-HCI (pH 7.4), 5 mM EDTA, and 0.1% SDS for 1.5 hours at 55° C., and washing in a buffer consisting of 2×SSC, 25 mM Tris-HCI (pH 7.4), 5 mM EDTA, and 0.1% SDS for 1.5 hours at 60° C.

[0722] 2. The protein complex according to No. 1 wherein the first protein is the protein “Nicastrin” (SEQ ID No:9), or a functionally active derivative thereof, or a functionally active fragment thereof, or a homologue thereof, or a variant of “Nicastrin” encoded by a nucleic acid that hybridizes to the “Nicastrin” nucleic acid under low stringency conditions.

3. The protein complex according to No. 1 comprising the following proteins:

[0723] (i) “18 kDa microsomal signal peptidase subunit” (SEQ ID No:53) or a functionally active derivative thereof, or a functionally active fragment thereof, or a homologue thereof, or a variant of “18 kDa microsomal signal peptidase subunit” encoded by a nucleic acid that hybridizes to the “18 kDa microsomal signal peptidase subunit” nucleic acid or its complement under low stringency conditions,

[0724] (ii) “25 kDa microsomal signal peptidase subunit” (SEQ ID No:119) or a functionally active derivative thereof, or a functionally active fragment thereof, or a homologue thereof, or a variant of “25 kDa microsomal signal peptidase subunit” encoded by a nucleic acid that hybridizes to the “25 kDa microsomal signal peptidase subunit” nucleic acid or its complement under low stringency conditions,

[0725] (iii) “ATP-binding cassette, sub-family A, member 3” (SEQ ID No:103) or a functionally active derivative thereof, or a functionally active fragment thereof, or a homologue thereof, or a variant of “ATP-binding cassette, sub-family A, member 3” encoded by a nucleic acid that hybridizes to the “ATP-binding cassette, sub-family A, member 3” nucleic acid or its complement under low stringency conditions,

[0726] (iv) “Aph-1a” (SEQ ID No:1) or a functionally active derivative thereof, or a functionally active fragment thereof, or a homologue thereof, or a variant of “Aph-1a” encoded by a nucleic acid that hybridizes to the “Aph-1a” nucleic acid or its complement under low stringency conditions,

[0727] (v) “BACE1” (SEQ ID No:68) or a functionally active derivative thereof, or a functionally active fragment thereof, or a homologue thereof, or a variant of “BACE1” encoded by a nucleic acid that hybridizes to the “BACE1” nucleic acid or its complement under low stringency conditions,

[0728] (vi) “BSCv protein” (SEQ ID No:70) or a functionally active derivative thereof, or a functionally active fragment thereof, or a homologue thereof, or a variant of “BSCv protein” encoded by a nucleic acid that hybridizes to the “BSCv protein” nucleic acid or its complement under low stringency conditions,

[0729] (vii) “CGI-13” (SEQ ID No:72) or a functionally active derivative thereof, or a functionally active fragment thereof, or a homologue thereof, or a variant of “CGI-13” encoded by a nucleic acid that hybridizes to the “CGI-13” nucleic acid or its complement under low stringency conditions,

[0730] (viii) “Casein kinase II beta chain” (SEQ ID No:74) or a functionally active derivative thereof, or a functionally active fragment thereof, or a homologue thereof, or a variant of “Casein kinase II beta chain” encoded by a nucleic acid that hybridizes to the “Casein kinase II beta chain” nucleic acid or its complement under low stringency conditions,

[0731] (ix) “Cathepsin B” (SEQ ID No:75) or a functionally active derivative thereof, or a functionally active fragment thereof, or a homologue thereof, or a variant of “Cathepsin B” encoded by a nucleic acid that hybridizes to the “Cathepsin B” nucleic acid or its complement under low stringency conditions,

[0732] (x) “Delta-6 fatty acid desaturase” (SEQ ID No:76) or a functionally active derivative thereof, or a functionally active fragment thereof, or a homologue thereof, or a variant of “Delta-6 fatty acid desaturase” encoded by a nucleic acid that hybridizes to the “Delta-6 fatty acid desaturase” nucleic acid or its complement under low stringency conditions,

[0733] (xi) “ENSG00000144840” (SEQ ID No:79) or a functionally active derivative thereof, or a functionally active fragment thereof, or a homologue thereof, or a variant of “ENSG00000144840” encoded by a nucleic acid that hybridizes to the “ENSG00000144840” nucleic acid or its complement under low stringency conditions,

[0734] (xii) “FLJ13977” (SEQ ID No:81) or a functionally active derivative thereof, or a functionally active fragment thereof, or a homologue thereof, or a variant of “FLJ13977” encoded by a nucleic acid that hybridizes to the “FLJ13977” nucleic acid or its complement under low stringency conditions,

[0735] (xiii) “FLJ20342” (SEQ ID No:56) or a functionally active derivative thereof, or a functionally active fragment thereof, or a homologue thereof, or a variant of “FLJ20342” encoded by a nucleic acid that hybridizes to the “FLJ20342” nucleic acid or its complement under low stringency conditions,

[0736] (xiv) “FLJ20481” (SEQ ID No:82) or a functionally active derivative thereof, or a functionally active fragment thereof, or a homologue thereof, or a variant of “FLJ20481” encoded by a nucleic acid that hybridizes to the “FLJ20481” nucleic acid or its complement under low stringency conditions,

[0737] (xv) “FLJ22390” (SEQ ID No:84) or a functionally active derivative thereof, or a functionally active fragment thereof, or a homologue thereof, or a variant of “FLJ22390” encoded by a nucleic acid that hybridizes to the “FLJ22390” nucleic acid or its complement under low stringency conditions,

[0738] (xvi) “Hypothetical protein tyrosine phosphatase ensg00000149185” (SEQ ID No:86) or a functionally active derivative thereof, or a functionally active fragment thereof, or a homologue thereof, or a variant of “Hypothetical protein tyrosine phosphatase ensg00000149185” encoded by a nucleic acid that hybridizes to the “Hypothetical protein tyrosine phosphatase ensg00000149185” nucleic acid or its complement under low stringency conditions,

[0739] (xvii) “ICAM-2” (SEQ ID No:87) or a functionally active derivative thereof, or a functionally active fragment thereof, or a homologue thereof, or a variant of “ICAM-2” encoded by a nucleic acid that hybridizes to the “ICAM-2” nucleic acid or its complement under low stringency conditions,

[0740] (xviii) “KIAA1181” (SEQ ID No:88) or a functionally active derivative thereof, or a functionally active fragment thereof, or a homologue thereof, or a variant of “KIAA1181” encoded by a nucleic acid that hybridizes to the “KIAA1181” nucleic acid or its complement under low stringency conditions,

[0741] (xix) “KIAA1533” (SEQ ID No:89) or a functionally active derivative thereof, or a functionally active fragment thereof, or a homologue thereof, or a variant of “KIAA1533” encoded by a nucleic acid that hybridizes to the “KIAA1533” nucleic acid or its complement under low stringency conditions,

[0742] (xx) “Mesenchymal stem cell protein DSCD75” (SEQ ID No:91) or a functionally active derivative thereof, or a functionally active fragment thereof, or a homologue thereof, or a variant of “Mesenchymal stem cell protein DSCD75” encoded by a nucleic acid that hybridizes to the “Mesenchymal stem cell protein DSCD75” nucleic acid or its complement under low stringency conditions,

[0743] (xxi) “NICE-3” (SEQ ID No:58) or a functionally active derivative thereof, or a functionally active fragment thereof, or a homologue thereof, or a variant of “NICE-3” encoded by a nucleic acid that hybridizes to the “NICE-3” nucleic acid or its complement under low stringency conditions,

[0744] (xxii) “Neurotrypsin” (SEQ ID No:92) or a functionally active derivative thereof, or a functionally active fragment thereof, or a homologue thereof, or a variant of “Neurotrypsin” encoded by a nucleic acid that hybridizes to the “Neurotrypsin” nucleic acid or its complement under low stringency conditions,

[0745] (xxiii) “Nicastrin” (SEQ ID No:9) or a functionally active derivative thereof, or a functionally active fragment thereof, or a homologue thereof, or a variant of “Nicastrin” encoded by a nucleic acid that hybridizes to the “Nicastrin” nucleic acid or its complement under low stringency conditions,

[0746] (xxiv) “PP1, regulatory subunit 15B” (SEQ ID No:93) or a functionally active derivative thereof, or a functionally active fragment thereof, or a homologue thereof, or a variant of “PP1, regulatory subunit 15B” encoded by a nucleic acid that hybridizes to the “PP1, regulatory subunit 15B” nucleic acid or its complement under low stringency conditions,

[0747] (xxv) “Pen-2” (SEQ ID No:10) or a functionally active derivative thereof, or a functionally active fragment thereof; or a homologue thereof, or a variant of “Pen-2” encoded by a nucleic acid that hybridizes to the “Pen-2” nucleic acid or its complement under low stringency conditions,

[0748] (xxvi) “Presenilin-1” (SEQ ID No:14) or a functionally active derivative thereof, or a functionally active fragment thereof, or a homologue thereof, or a variant of “Presenilin-1” encoded by a nucleic acid that hybridizes to the “Presenilin-1” nucleic acid or its complement under low stringency conditions,

[0749] (xxvii) “Presenilin-2” (SEQ ID No:66) or a functionally active derivative thereof, or a functionally active fragment thereof, or a homologue thereof, or a variant of “Presenilin-2” encoded by a nucleic acid that hybridizes to the “Presenilin-2” nucleic acid or its complement under low stringency conditions,

[0750] (xxviii) “Protein amplified in osteosarcoma (OS-9)” (SEQ ID No:94) or a functionally active derivative thereof, or a functionally active fragment thereof, or a homologue thereof, or a variant of “Protein amplified in osteosarcoma (OS-9)” encoded by a nucleic acid that hybridizes to the “Protein amplified in osteosarcoma (OS-9)” nucleic acid or its complement under low stringency conditions,

[0751] (xxix) “Protein similar to stromal cell-derived factor 2” (SEQ ID No:95) or a functionally active derivative thereof, or a functionally active fragment thereof, or a homologue thereof, or a variant of “Protein similar to stromal cell-derived factor 2” encoded by a nucleic acid that hybridizes to the “Protein similar to stromal cell-derived factor 2” nucleic acid or its complement under low stringency conditions,

[0752] (xxx) “Protocadherin beta 8” (SEQ ID No:96) or a functionally active derivative thereof, or a functionally active fragment thereof, or a homologue thereof, or a variant of “Protocadherin beta 8” encoded by a nucleic acid that hybridizes to the “Protocadherin beta 8” nucleic acid or its complement under low stringency conditions,

[0753] (xxxi) “REP8 protein” (SEQ ID No:97) or a functionally active derivative thereof, or a functionally active fragment thereof, or a homologue thereof, or a variant of “REP8 protein” encoded by a nucleic acid that hybridizes to the “REP8 protein” nucleic acid or its complement under low stringency conditions,

[0754] (xxxii) “RING finger protein 5” (SEQ ID No:98) or a functionally active derivative thereof, or a functionally active fragment thereof, or a homologue thereof, or a variant of “RING finger protein 5” encoded by a nucleic acid that hybridizes to the “RING finger protein 5” nucleic acid or its complement under low stringency conditions,

[0755] (xxxiii) “Retinal short-chain dehydrogenase/reductase retSDR2” (SEQ ID No:99) or a functionally active derivative thereof, or a functionally active fragment thereof, or a homologue thereof, or a variant of “Retinal short-chain dehydrogenase/reductase retSDR2” encoded by a nucleic acid that hybridizes to the “Retinal short-chain dehydrogenase/reductase retSDR2” nucleic acid or its complement under low stringency conditions,

[0756] (xxxiv) “Stromal cell-derived factor 2-like 1” (SEQ ID No:100) or a functionally active derivative thereof, or a functionally active fragment thereof, or a homologue thereof, or a variant of “Stromal cell-derived factor 2-like 1” encoded by a nucleic acid that hybridizes to the “Stromal cell-derived factor 2-like 1” nucleic acid or its complement under low stringency conditions,

[0757] (xxxv) “Thioredoxin domain-containing protein” (SEQ ID No:101) or a functionally active derivative thereof, or a functionally active fragment thereof, or a homologue thereof, or a variant of “Thioredoxin domain-containing protein” encoded by a nucleic acid that hybridizes to the “Thioredoxin domain-containing protein” nucleic acid or its complement under low stringency conditions, and/or

[0758] (xxxvi) “Voltage-dependent anion channel 1” (SEQ ID No:102) or a functionally active derivative thereof, or a functionally active fragment thereof, or a homologue thereof, or a variant of “Voltage-dependent anion channel 1” encoded by a nucleic acid that hybridizes to the “Voltage-dependent anion channel 1” nucleic acid or its complement under low stringency conditions.

4. The protein complex according to No. 1 comprising all but 1-29 of the following proteins:

[0759] (i) “18 kDa microsomal signal peptidase subunit” (SEQ ID No:53) or a functionally active derivative thereof, or a functionally active fragment thereof, or a homologue thereof, or a variant of “18 kDa microsomal signal peptidase subunit” encoded by a nucleic acid that hybridizes to the “18 kDa microsomal signal peptidase subunit” nucleic acid or its complement under low stringency conditions,

[0760] (ii) “25 kDa microsomal signal peptidase subunit” (SEQ ID No:119) or a functionally active derivative thereof, or a functionally active fragment thereof, or a homologue thereof, or a variant of “25 kDa microsomal signal peptidase subunit” encoded by a nucleic acid that hybridizes to the “25 kDa microsomal signal peptidase subunit” nucleic acid or its complement under low stringency conditions,

[0761] (iii) “ATP-binding cassette, sub-family A, member 3” (SEQ ID No:103) or a functionally active derivative thereof, or a functionally active fragment thereof, or a homologue thereof, or a variant of “ATP-binding cassette, sub-family A, member 3” encoded by a nucleic acid that hybridizes to the “ATP-binding cassette, sub-family A, member 3” nucleic acid or its complement under low stringency conditions,

[0762] (iv) “Aph-1a” (SEQ ID No:1) or a functionally active derivative thereof, or a functionally active fragment thereof, or a homologue thereof, or a variant of “Aph-1a” encoded by a nucleic acid that hybridizes to the “Aph-1a” nucleic acid or its complement under low stringency conditions,

[0763] (v) “BACE1” (SEQ ID No:68) or a functionally active derivative thereof, or a functionally active fragment thereof, or a homologue thereof, or a variant of “BACE1” encoded by a nucleic acid that hybridizes to the “BACE1” nucleic acid or its complement under low stringency conditions,

[0764] (vi) “BSCv protein” (SEQ ID No:70) or a functionally active derivative thereof, or a functionally active fragment thereof, or a homologue thereof, or a variant of “BSCv protein” encoded by a nucleic acid that hybridizes to the “BSCv protein” nucleic acid or its complement under low stringency conditions,

[0765] (vii) “CGI-13” (SEQ ID No:72) or a functionally active derivative thereof, or a functionally active fragment thereof, or a homologue thereof, or a variant of “CGI-13” encoded by a nucleic acid that hybridizes to the “CGI-13” nucleic acid or its complement under low stringency conditions,

[0766] (viii) “Casein kinase II beta chain” (SEQ ID No:74) or a functionally active derivative thereof, or a functionally active fragment thereof, or a homologue thereof, or a variant of “Casein kinase II beta chain” encoded by a nucleic acid that hybridizes to the “Casein kinase II beta chain” nucleic acid or its complement under low stringency conditions,

[0767] (ix) “Cathepsin B” (SEQ ID No:75) or a functionally active derivative thereof, or a functionally active fragment thereof, or a homologue thereof, or a variant of “Cathepsin B” encoded by a nucleic acid that hybridizes to the “Cathepsin B” nucleic acid or its complement under low stringency conditions,

[0768] (x) “Delta-6 fatty acid desaturase” (SEQ ID No:76) or a functionally active derivative thereof, or a functionally active fragment thereof, or a homologue thereof, or a variant of “Delta-6 fatty acid desaturase” encoded by a nucleic acid that hybridizes to the “Delta-6 fatty acid desaturase” nucleic acid or its complement under low stringency conditions,

[0769] (xi) “ENSG00000144840” (SEQ ID No:79) or a functionally active derivative thereof, or a functionally active fragment thereof, or a homologue thereof, or a variant of “ENSG00000144840” encoded by a nucleic acid that hybridizes to the “ENSG00000144840” nucleic acid or its complement under low stringency conditions,

[0770] (xii) “FLJ13977” (SEQ ID No:81) or a functionally active derivative thereof, or a functionally active fragment thereof, or a homologue thereof, or a variant of “FLJ13977” encoded by a nucleic acid that hybridizes to the “FLJ13977” nucleic acid or its complement under low stringency conditions,

[0771] (xiii) “FLJ20342” (SEQ ID No:56) or a functionally active derivative thereof, or a functionally active fragment thereof, or a homologue thereof, or a variant of “FLJ20342” encoded by a nucleic acid that hybridizes to the “FLJ20342” nucleic acid or its complement under low stringency conditions,

[0772] (xiv) “FLJ20481” (SEQ ID No:82) or a functionally active derivative thereof, or a functionally active fragment thereof, or a homologue thereof, or a variant of “FLJ20481” encoded by a nucleic acid that hybridizes to the “FLJ20481” nucleic acid or its complement under low stringency conditions,

[0773] (xv) “FLJ22390” (SEQ ID No:84) or a functionally active derivative thereof, or a functionally active fragment thereof, or a homologue thereof, or a variant of “FLJ22390” encoded by a nucleic acid that hybridizes to the “FLJ22390” nucleic acid or its complement under low stringency conditions,

[0774] (xvi) “Hypothetical protein tyrosine phosphatase ensg00000149185” (SEQ ID No:86) or a functionally active derivative thereof, or a functionally active fragment thereof, or a homologue thereof, or a variant of “Hypothetical protein tyrosine phosphatase ensg00000149185” encoded by a nucleic acid that hybridizes to the “Hypothetical protein tyrosine phosphatase ensg00000149185” nucleic acid or its complement under low stringency conditions,

[0775] (xvii) “ICAM-2” (SEQ ID No:87) or a functionally active derivative thereof, or a functionally active fragment thereof, or a homologue thereof, or a variant of “ICAM-2” encoded by a nucleic acid that hybridizes to the “ICAM-2” nucleic acid or its complement under low stringency conditions,

[0776] (xviii) “KIAA1181” (SEQ ID No:88) or a functionally active derivative thereof, or a functionally active fragment thereof, or a homologue thereof, or a variant of “KIAA1181” encoded by a nucleic acid that hybridizes to the “KIAA1181” nucleic acid or its complement under low stringency conditions,

[0777] (xix) “KIAA1533” (SEQ ID No:89) or a functionally active derivative thereof, or a functionally active fragment thereof, or a homologue thereof, or a variant of “KIAA1533” encoded by a nucleic acid that hybridizes to the “KIAA1533” nucleic acid or its complement under low stringency conditions,

[0778] (xx) “Mesenchymal stem cell protein DSCD75” (SEQ ID No:91) or a functionally active derivative thereof, or a functionally active fragment thereof, or a homologue thereof, or a variant of “Mesenchymal stem cell protein DSCD75” encoded by a nucleic acid that hybridizes to the “Mesenchymal stem cell protein DSCD75” nucleic acid or its complement under low stringency conditions,

[0779] (xxi) “NICE-3” (SEQ ID No:58) or a functionally active derivative thereof, or a functionally active fragment thereof, or a homologue thereof, or a variant of “NICE-3” encoded by a nucleic acid that hybridizes to the “NICE-3” nucleic acid or its complement under low stringency conditions,

[0780] (xxii) “Neurotrypsin” (SEQ ID No:92) or a functionally active derivative thereof, or a functionally active fragment thereof, or a homologue thereof, or a variant of “Neurotrypsin” encoded by a nucleic acid that hybridizes to the “Neurotrypsin” nucleic acid or its complement under low stringency conditions,

[0781] (xxiii) “Nicastrin” (SEQ ID No:9) or a functionally active derivative thereof, or, a functionally active fragment thereof, or a homologue thereof, or a variant of “Nicastrin” encoded by a nucleic acid that hybridizes to the “Nicastrin” nucleic acid or its complement under low stringency conditions,

[0782] (xxiv) “PP1, regulatory subunit 15B” (SEQ ID No:93) or a functionally active derivative thereof, or a functionally active fragment thereof, or a homologue thereof, or a variant of “PP1, regulatory subunit 15B” encoded by a nucleic acid that hybridizes to the “PP1, regulatory subunit 15B” nucleic acid or its complement under low stringency conditions,

[0783] (xxv) “Pen-2” (SEQ ID No:10) or a functionally active derivative thereof, or a functionally active fragment thereof, or a homologue thereof, or a variant of “Pen-2” encoded by a nucleic acid that hybridizes to the “Pen-2” nucleic acid or its complement under low stringency conditions,

[0784] (xxvi) “Presenilin-1” (SEQ ID No:14) or a functionally active derivative thereof, or a functionally active fragment thereof, or a homologue thereof, or a variant of “Presenilin-1” encoded by a nucleic acid that hybridizes to the “Presenilin-1” nucleic acid or its complement under low stringency conditions,

[0785] (xxvii) “Presenilin-2” (SEQ ID No:66) or a functionally active derivative thereof, or a functionally active fragment thereof, or a homologue thereof, or a variant of “Presenilin-2” encoded by a nucleic acid that hybridizes to the “Presenilin-2” nucleic acid or its complement under low stringency conditions,

[0786] (xxviii) “Protein amplified in osteosarcoma (OS-9)” (SEQ ID No:94) or a functionally active derivative thereof, or a functionally active fragment thereof, or a homologue thereof, or a variant of “Protein amplified in osteosarcoma (OS-9)” encoded by a nucleic acid that hybridizes to the “Protein amplified in osteosarcoma (OS-9)” nucleic acid or its complement under low stringency conditions,

[0787] (xxix) “Protein similar to stromal cell-derived factor 2” (SEQ ID No:95) or a functionally active derivative thereof, or a functionally active fragment thereof, or a homologue thereof, or a variant of “Protein similar to stromal cell-derived factor 2” encoded by a nucleic acid that hybridizes to the “Protein similar to stromal cell-derived factor 2” nucleic acid or its complement under low stringency conditions,

[0788] (xxx) “Protocadherin beta 8” (SEQ ID No:96) or a functionally active derivative thereof, or a functionally active fragment thereof, or a homologue thereof, or a variant of “Protocadherin beta 8” encoded by a nucleic acid that hybridizes to the “Protocadherin beta 8” nucleic acid or its complement under low stringency conditions,

[0789] (xxxi) “REP8 protein” (SEQ ID No:97) or a functionally active derivative thereof, or a functionally active fragment thereof, or a homologue thereof, or a variant of “REP8 protein” encoded by a nucleic acid that hybridizes to the “REP8 protein” nucleic acid or its complement under low stringency conditions,

[0790] (xxxii) “RING finger protein 5” (SEQ ID No:98) or a functionally active derivative thereof, or a functionally active fragment thereof, or a homologue thereof, or a variant of “RING finger protein 5” encoded by a nucleic acid that hybridizes to the “RING finger protein 5” nucleic acid or its complement under low stringency conditions,

[0791] (xxxiii) “Retinal short-chain dehydrogenase/reductase retSDR2” (SEQ ID No:99) or a functionally active derivative thereof, or a functionally active fragment thereof, or a homologue thereof, or a variant of “Retinal short-chain dehydrogenase/reductase retSDR2” encoded by a nucleic acid that hybridizes to the “Retinal short-chain dehydrogenase/reductase retSDR2” nucleic acid or its complement under low stringency conditions,

[0792] (xxxiv) “Stromal cell-derived factor 2-like 1” (SEQ ID No:100) or a functionally active derivative thereof, or a functionally active fragment thereof, or a homologue thereof, or a variant of “Stromal cell-derived factor 2-like 1” encoded by a nucleic acid that hybridizes to the “Stromal cell-derived factor 2-like 1” nucleic acid or its complement under low stringency conditions,

[0793] (xxxv) “Thioredoxin domain-containing protein” (SEQ ID No:101) or a functionally active derivative thereof, or a functionally active fragment thereof, or a homologue thereof, or a variant of “Thioredoxin domain-containing protein” encoded by a nucleic acid that hybridizes to the “Thioredoxin domain-containing protein” nucleic acid or its complement under low stringency conditions,

[0794] (xxxvi) “Voltage-dependent anion channel 1” (SEQ ID No:102) or a functionally active derivative thereof, or a functionally active fragment thereof, or a homologue thereof, or a variant of “Voltage-dependent anion channel 1” encoded by a nucleic acid that hybridizes to the “Voltage-dependent anion channel 1” nucleic acid or its complement under low stringency conditions.

[0795] 5. The complex of any of No. 1-4 comprising a functionally active derivative of said first protein and/or a functionally active derivative of said second protein, wherein the functionally active derivative is a fusion protein comprising said first protein or said second protein fused to an amino acid sequence different from the first protein or second protein, respectively.

6. The complex of No. 5 wherein the functionally active derivative is a fusion protein comprising said first protein or said second protein fused to an affinity tag or label.

7. The complex of any of No. 1-4 comprising a fragment of said first protein and/or a fragment of said second protein, which fragment binds to another protein component of said complex.

[0796] 8. The complex of any of No. 1-7 that is involved in the the production of Abeta-40 and Abeta-42 peptides by ELISA (e.g. by modifying the expression of one or several interacting proteins in cells by means of RNAi (siRNA) and/or plasmids encoding the interacting protein(s)), the production of C-terminal APP fragments in cell lines or transgenic animals by western blot (e.g. by modifying the expression of one or several interacting proteins in cells by means of RNAi (siRNA) and/or plasmids encoding the interacting protein(s)), the proteolytic activity of beta- or gamma secretases towards bacterially expressed APP fragments in vitro (e.g. by modifying the expression of one or several interacting proteins in cells by means of RNAi (siRNA) and/or plasmids encoding the interacting protein(s)) or transactivation of a Gal4-driven reporter gene (e.g. by modifying the expression of one or several interacting proteins in cells by means of RNAi (siRNA) and/or plasmids encoding the interacting protein(s)).

9. A process for preparing a complex of any of No. 1-8 and optionally the components thereof comprising the following steps:

[0797] expressing a protein (bait) of the complex, preferably a tagged protein, in a target cell, isolating the protein complex which is attached to the bait protein, and optionally dissociating the protein complex and isolating the individual complex members.

10. The process according to No. 9 wherein the tagged protein comprises two different tags which allow two separate affinity purification steps.

11. The process according to any of No. 9-10 wherein the two tags are separated by a cleavage site for a protease.

12. Component of the Nicastrin complex obtainable by a process according to any of No. 9-11.

13. Protein of the Nicastrin complex selected from

[0798] (i) “ATP-binding cassette, sub-family A, member 3” (SEQ ID No:103) or a functionally active derivative thereof, or a functionally active fragment thereof, or a homologue thereof, or a variant of “ATP-binding cassette, sub-family A, member 3” encoded by a nucleic acid that hybridizes to the “ATP-binding cassette, sub-family A, member 3” nucleic acid or its complement under low stringency conditions,

[0799] (ii) “CGI-13” (SEQ ID No:72) or a functionally active derivative thereof, or a functionally active fragment thereof, or a homologue thereof, or a variant of “CGI-13” encoded by a nucleic acid that hybridizes to the “CGI-13” nucleic acid or its complement under low stringency conditions,

[0800] (iii) “ENSG00000144840” (SEQ ID No:79) or a functionally active derivative thereof, or a functionally active fragment thereof, or a homologue thereof, or a variant of “ENSG00000144840” encoded by a nucleic acid that hybridizes to the “ENSG00000144840” nucleic acid or its complement under low stringency conditions,

[0801] (iv) “FLJ20342” (SEQ ID No:56) or a functionally active derivative thereof, or a functionally active fragment thereof, or a homologue thereof, or a variant of “FLJ20342” encoded by a nucleic acid that hybridizes to the “FLJ20342” nucleic acid or its complement under low stringency conditions,

[0802] (v) “FLJ20481” (SEQ ID No:82) or a functionally active derivative thereof, or a functionally active fragment thereof, or a homologue thereof, or a variant of “FLJ20481” encoded by a nucleic acid that hybridizes to the “FLJ20481” nucleic acid or its complement under low stringency conditions,

[0803] (vi) “FLJ22390” (SEQ ID No:84) or a functionally active derivative thereof, or a functionally active fragment thereof, or a homologue thereof, or a variant of “FLJ22390” encoded by a nucleic acid that hybridizes to the “FLJ22390” nucleic acid or its complement under low stringency conditions,

[0804] (vii) “Hypothetical protein tyrosine phosphatase ensg00000149185” (SEQ ID No:86) or a functionally active derivative thereof, or a functionally active fragment thereof, or a homologue thereof, or a variant of “Hypothetical protein tyrosine phosphatase ensg00000149185” encoded by a nucleic acid that hybridizes to the “Hypothetical protein tyrosine phosphatase ensg00000149185” nucleic acid or its complement under low stringency conditions,

[0805] (viii) “KIAA1181” (SEQ ID No:88) or a functionally active derivative thereof, or a functionally active fragment thereof, or a homologue thereof, or a variant of “KIAA1181” encoded by a nucleic acid that hybridizes to the “KIAA1181” nucleic acid or its complement under low stringency conditions,

[0806] (ix) “KIAA1533” (SEQ ID No:89) or a functionally active derivative thereof, or a functionally active fragment thereof, or a homologue thereof, or a variant of “KIAA1533” encoded by a nucleic acid that hybridizes to the “KIAA1533” nucleic acid or its complement under low stringency conditions,

[0807] (x) “PP1, regulatory subunit 15B” (SEQ ID No:93) or a functionally active derivative thereof, or a functionally active fragment thereof, or a homologue thereof, or a variant of “PP1, regulatory subunit 15B” encoded by a nucleic acid that hybridizes to the “PP1, regulatory subunit 15B” nucleic acid or its complement under low stringency conditions,

[0808] (xi) “RING finger protein 5” (SEQ ID No:98) or a functionally active derivative thereof, or a functionally active fragment thereof, or a homologue thereof, or a variant of “RING finger protein 5” encoded by a nucleic acid that hybridizes to the “RING finger protein 5” nucleic acid or its complement under low stringency conditions, and

[0809] (xii) “Thioredoxin domain-containing protein” (SEQ ID No:101) or a functionally active derivative thereof, or a functionally active fragment thereof, or a homologue thereof, or a variant of “Thioredoxin domain-containing protein” encoded by a nucleic acid that hybridizes to the “Thioredoxin domain-containing protein” nucleic acid or its complement under low stringency conditions, wherein said low stringency conditions comprise hybridization in a buffer comprising 35% formamide, 5×SSC, 50 mM Tris-HCI (pH 7.5), 5 mM EDTA, 0.02% PVP, 0.02% Ficoll, 0.2% BSA, 100 ug/ml denatured salmon sperm DNA, and 10% (wt/vol) dextran sulfate for 18-20 hours at 40° C., washing in a buffer consisting of 2×SSC, 25 mM Tris-HCI (pH 7.4), 5 mM EDTA, and 0.1% SDS for 1.5 hours at 55° C., and washing in a buffer consisting of 2×SSC, 25 mM Tris-HCI (pH 7.4), 5 mM EDTA, and 0.1% SDS for 1.5 hours at 60° C.

14. Nucleic acid encoding a protein according to No. 13.

15. Construct, preferably a vector construct, comprising:

(a) a nucleic acid according to No. 14 and at least one further nucleic acid which is normally not associated with said nucleic acid, or

[0810] (b) at least two separate nucleic acid sequences each encoding a different protein, or a functionally active fragment or a functionally active derivative of at least one of said proteins, or functionally active fragments or functionally active derivative thereof being selected from the first group of proteins according to No. 1 (a) and at least one of said proteins, or functionally active fragments or functionally active derivative thereof being selected from the second group of proteins according to No. 1 (b).

[0811] 16. Host cell, containing a vector comprising at least one of the nucleic acid of No. 14 and/or a construct of No. 15 or containing several vectors each comprising at least the nucleic acid sequence encoding at least one of the proteins, or functionally active fragments or functionally active derivatives thereof selected from the first group of proteins according to No. 1 (a) and the proteins, or functionally active fragments or functionally active derivatives thereof selected from the second group of proteins according to No. 1 (b).

[0812] 17. An antibody or a fragment of said antibody containing the binding domain thereof, selected from an antibody or fragment thereof, which binds the complex of any of No. 1-8 and which does not bind any of the proteins of said complex when uncomplexed and an antibody or a fragment of said antibody which binds to any of the proteins according to No. 13.

18. A kit comprising in one or more container the complex of any of No. 1-8 and/or the proteins of No. 13 optionally together with an antibody according to No. 17 and/or further components such as reagents and working instructions.

19. The kit according to No. 18 for processing a substrate of said complex.

20. The kit according to No. 18 for the diagnosis or prognosis of a disease or a disease risk, preferentially for a disease or disorder such as neurodegenerative diseases such as Alzheimer's disease and related neurodegenerative disorders.

21. Array, in which at least a complex according to any of No. 1-8 and/or at least one protein according to No. 14 and/or at least one antibody according to No. 17 is attached to a solid carrier.

22. A process for processing a physiological substrate of the complex comprising the step of bringing into contact a complex to any of No. 1-8 with said substrate, such that said substrate is processed.

23. A pharmaceutical composition comprising the protein complex of any of No. 1-8 and/or any of the following the proteins:

[0813] (i) “ATP-binding cassette, sub-family A, member 3” (SEQ ID No:103) or a functionally active derivative thereof, or a functionally active fragment thereof, or a homologue thereof, or a variant of “ATP-binding cassette, sub-family A, member 3” encoded by a nucleic acid that hybridizes to the “ATP-binding cassette, sub-family A, member 3” nucleic acid or its complement under low stringency conditions,

[0814] (ii) “CGI-13” (SEQ ID No:72) or a functionally active derivative thereof, or a functionally active fragment thereof, or a homologue thereof, or a variant of “CGI-13” encoded by a nucleic acid that hybridizes to the “CGI-13” nucleic acid or its complement under low stringency conditions,

[0815] (iii) “ENSG00000144840” (SEQ ID No:79) or a functionally active derivative thereof, or a functionally active fragment thereof, or a homologue thereof, or a variant of “ENSG00000144840” encoded by a nucleic acid that hybridizes to the “ENSG00000144840” nucleic acid or its complement under low stringency conditions,

[0816] (iv) “FLJ20342” (SEQ ID No:56) or a functionally active derivative thereof, or a functionally active fragment thereof, or a homologue thereof, or a variant of “FLJ20342” encoded by a nucleic acid that hybridizes to the “FLJ20342” nucleic acid or its complement under low stringency conditions,

[0817] (v) “FLJ20481” (SEQ ID No:82) or a functionally active derivative thereof, or a functionally active fragment thereof, or a homologue thereof, or a variant of “FLJ20481” encoded by a nucleic acid that hybridizes to the “FLJ20481” nucleic acid or its complement under low stringency conditions,

[0818] (vi) “FLJ22390” (SEQ ID No:84) or a functionally active derivative thereof, or a functionally active fragment thereof, or a homologue thereof, or a variant of “FLJ22390” encoded by a nucleic acid that hybridizes to the “FLJ22390” nucleic acid or its complement under low stringency conditions,

[0819] (vii) “Hypothetical protein tyrosine phosphatase ensg00000149185” (SEQ ID No:86) or a functionally active derivative thereof, or a functionally active fragment thereof, or a homologue thereof, or a variant of “Hypothetical protein tyrosine phosphatase ensg00000149185” encoded by a nucleic acid that hybridizes to the “Hypothetical protein tyrosine phosphatase ensg00000149185” nucleic acid or its complement under low stringency conditions,

[0820] (viii) “KIAA1181” (SEQ ID No:88) or a functionally active derivative thereof, or a functionally active fragment thereof, or a homologue thereof, or a variant of “KIAA1181” encoded by a nucleic acid that hybridizes to the “KIAA1181” nucleic acid or its complement under low stringency conditions,

[0821] (ix) “KIAA1533” (SEQ ID No:89) or a functionally active derivative thereof, or a functionally active fragment thereof, or a homologue thereof, or a variant of “KIAA1533” encoded by a nucleic acid that hybridizes to the “KIAA1533” nucleic acid or its complement under low stringency conditions,

[0822] (x) “PP1, regulatory subunit 15B” (SEQ ID No:93) or a functionally active derivative thereof, or a functionally active fragment thereof, or a homologue thereof, or a variant of “PP1, regulatory subunit 15B” encoded by a nucleic acid that hybridizes to the “PP1, regulatory subunit 15B” nucleic acid or its complement under low stringency conditions,

[0823] (xi) “RING finger protein 5” (SEQ ID No:98) or a functionally active derivative thereof, or a functionally active fragment thereof, or a homologue thereof, or a variant of “RING finger protein 5” encoded by a nucleic acid that hybridizes to the “RING finger protein 5” nucleic acid or its complement under low stringency conditions, and/or

[0824] (xii) “Thioredoxin domain-containing protein” (SEQ ID No:101) or a functionally active derivative thereof, or a functionally active fragment thereof, or a homologue thereof, or a variant of “Thioredoxin domain-containing protein” encoded by a nucleic acid that hybridizes to the “Thioredoxin domain-containing protein” nucleic acid or its complement under low stringency conditions, and a pharmaceutical acceptable carrier.

24. A pharmaceutical composition according to No. 23 for the treatment of diseases and disorders such as neurodegenerative diseases such as Alzheimer's disease and related neurodegenerative disorders.

25. A method for screening for a molecule that binds to the complex of anyone of No. 1-8 and/or any of the following the proteins:

[0825] (i) “ATP-binding cassette, sub-family A, member 3” (SEQ ID No:103) or a functionally active derivative thereof, or a functionally active fragment thereof, or a homologue thereof, or a variant of “ATP-binding cassette, sub-family A, member 3” encoded by a nucleic acid that hybridizes to the “ATP-binding cassette, sub-family A, member 3” nucleic acid or its complement under low stringency conditions,

[0826] (ii) “CGI-13” (SEQ ID No:72) or a functionally active derivative thereof, or a functionally active fragment thereof, or a homologue thereof, or a variant of “CGI-13” encoded by a nucleic acid that hybridizes to the “CGI-13” nucleic acid or its complement under low stringency conditions,

[0827] (iii) “ENSG00000144840” (SEQ ID No:79) or a functionally active derivative thereof, or a functionally active fragment thereof, or a homologue thereof, or a variant of “ENSG00000144840” encoded by a nucleic acid that hybridizes to the “ENSG00000144840” nucleic acid or its complement under low stringency conditions,

[0828] (iv) “FLJ20342” (SEQ ID No:56) or a functionally active derivative thereof, or a functionally active fragment thereof, or a homologue thereof, or a variant of “FLJ20342” encoded by a nucleic acid that hybridizes to the “FLJ20342” nucleic acid or its complement under low stringency conditions,

[0829] (v) “FLJ20481” (SEQ ID No:82) or a functionally active derivative thereof, or a functionally active fragment thereof, or a homologue thereof, or a variant of “FLJ20481” encoded by a nucleic acid that hybridizes to the “FLJ20481” nucleic acid or its complement under low stringency conditions,

[0830] (vi) “FLJ22390” (SEQ ID No:84) or a functionally active derivative thereof, or a functionally active fragment thereof, or a homologue thereof, or a variant of “FLJ22390” encoded by a nucleic acid that hybridizes to the “FLJ22390” nucleic acid or its complement under low stringency conditions,

[0831] (vii) “Hypothetical protein tyrosine phosphatase ensg00000149185” (SEQ ID No:86) or a functionally active derivative thereof, or a functionally active fragment thereof, or a homologue thereof, or a variant of “Hypothetical protein tyrosine phosphatase ensg00000149185” encoded by a nucleic acid that hybridizes to the “Hypothetical protein tyrosine phosphatase ensg00000149185” nucleic acid or its complement under low stringency conditions,

[0832] (viii) “KIAA1181” (SEQ ID No:88) or a functionally active derivative thereof, or a functionally active fragment thereof, or a homologue thereof, or a variant of “KIAA1181” encoded by a nucleic acid that hybridizes to the “KIAA1181” nucleic acid or its complement under low stringency conditions,

[0833] (ix) “KIAA1533” (SEQ ID No:89) or a functionally active derivative thereof, or a functionally active fragment thereof, or a homologue thereof, or a variant of “KIAA1533” encoded by a nucleic acid that hybridizes to the “KIAA1533” nucleic acid or its complement under low stringency conditions,

[0834] (x) “PP1, regulatory subunit 15B” (SEQ ID No:93) or a functionally active derivative thereof, or a functionally active fragment thereof, or a homologue thereof, or a variant of “PP1, regulatory subunit 15B” encoded by a nucleic acid that hybridizes to the “PP1, regulatory subunit 15B” nucleic acid or its complement under low stringency conditions,

[0835] (xi) “RING finger protein 5” (SEQ ID No:98) or a functionally active derivative thereof, or a functionally active fragment thereof, or a homologue thereof, or a variant of “RING finger protein 5” encoded by a nucleic acid that hybridizes to the “RING finger protein 5” nucleic acid or its complement under low stringency conditions, and/or

[0836] (xii) “Thioredoxin domain-containing protein” (SEQ ID No:101) or a functionally active derivative thereof, or a functionally active fragment thereof, or a homologue thereof, or a variant of “Thioredoxin domain-containing protein” encoded by a nucleic acid that hybridizes to the “Thioredoxin domain-containing protein” nucleic acid or its complement under low stringency conditions, comprising the steps of:

(a) exposing said complex, or a cell or organism containing same to one or more candidate molecules; and

(b) determining whether said candidate molecule is bound to the complex or protein.

26. A method for screening for a molecule that modulates directly or indirectly the function, activity, composition or formation of the complex of any one of No. 1-8 comprising the steps of:

(a) exposing said complex, or a cell or organism containing Nicastrin complex to one or more candidate molecules; and

[0837] (b) determining the amount of activity of protein components of, and/or intracellular localization of, said complex and/or the transcription level of a gene dependent on the complex and/or the abundance and/or activity of a protein or protein complex dependent on the function of the complex and/or product of a gene dependent on the complex in the presence of the one or more candidate molecules, wherein a change in said amount, activity, protein components or intracellular localization relative to said amount, activity, protein components and/or intracellular localization and/or a change in the transcription level of a gene dependent on the complex and/or the abundance and/or activity of a protein or protein complex dependent on the function of the complex and/or product of a gene dependent on the complex in the absence of said candidate molecules indicates that the molecule modulates function, activity or composition of said complex.

27. The method of No. 26, wherein the amount of said complex is determined.

28. The method of No. 26, wherein the activity of said complex is determined.

[0838] 29. The method of No. 28, wherein said determining step comprises isolating from the cell or organism said complex to produce said isolated complex and contacting said isolated complex in the presence or absence of a candidate molecule with a substrate of said complex and determining the processing of said substrate is modified in the presence of said candidate molecule.

30. The method of No. 26, wherein the amount of the individual protein components of said complex are determined.

31. The method of No. 30, wherein said determining step comprises determining whether

[0839] (i) “18 kDa microsomal signal peptidase subunit” (SEQ ID No:53) or a functionally active derivative thereof, or a functionally active fragment thereof, or a homologue thereof, or a variant of “18 kDa microsomal signal peptidase subunit” encoded by a nucleic acid that hybridizes to the “18 kDa microsomal signal peptidase subunit” nucleic acid or its complement under low stringency conditions, and/or

[0840] (ii) “25 kDa microsomal signal peptidase subunit” (SEQ ID No:119) or a functionally active derivative thereof, or a functionally active fragment thereof, or a homologue thereof, or a variant of “25 kDa microsomal signal peptidase subunit” encoded by a nucleic acid that hybridizes to the “25 kDa microsomal signal peptidase subunit” nucleic acid or its complement under low stringency conditions, and/or

[0841] (iii) “ATP-binding cassette, sub-family A, member 3” (SEQ ID No:103) or a functionally active derivative thereof, or a functionally active fragment thereof, or a homologue thereof, or a variant of “ATP-binding cassette, sub-family A, member 3” encoded by a nucleic acid that hybridizes to the “ATP-binding cassette, subfamily A, member 3” nucleic acid or its complement under low stringency conditions, and/or

[0842] (iv) “Aph-1a” (SEQ ID No:1) or a functionally active derivative thereof, or a functionally active fragment thereof; or a homologue thereof, or a variant of “Aph-1a” encoded by a nucleic acid that hybridizes to the “Aph-1a” nucleic acid or its complement under low stringency conditions, and/or

[0843] (v) “BACE1” (SEQ ID No:68) or a functionally active derivative thereof, or a functionally active fragment thereof, or a homologue thereof, or a variant of “BACE1” encoded by a nucleic acid that hybridizes to the “BACE1” nucleic acid or its complement under low stringency conditions, and/or

[0844] (vi) “BSCv protein” (SEQ ID No:70) or a functionally active derivative thereof, or a functionally active fragment thereof, or a homologue thereof, or a variant of “BSCv protein” encoded by a nucleic acid that hybridizes to the “BSCv protein” nucleic acid or its complement under low stringency conditions, and/or

[0845] (vii) “CGI-13” (SEQ ID No:72) or a functionally active derivative thereof, or a functionally active fragment thereof, or a homologue thereof, or a variant of “CGI-13” encoded by a nucleic acid that hybridizes to the “CGI-13” nucleic acid or its complement under low stringency conditions, and/or

[0846] (viii) “Casein kinase II beta chain” (SEQ ID No:74) or a functionally active derivative thereof, or a functionally active fragment thereof, or a homologue thereof, or a variant of “Casein kinase II beta chain” encoded by a nucleic acid that hybridizes to the “Casein kinase II beta chain” nucleic acid or its complement under low stringency conditions, and/or

[0847] (ix) “Cathepsin B” (SEQ ID No:75) or a functionally active derivative thereof, or a functionally active fragment thereof, or a homologue thereof, or a variant of “Cathepsin B” encoded by a nucleic acid that hybridizes to the “Cathepsin B” nucleic acid or its complement under low stringency conditions, and/or

[0848] (x) “Delta-6 fatty acid desaturase” (SEQ ID No:76) or a functionally active derivative thereof, or a functionally active fragment thereof, or a homologue thereof, or a variant of “Delta-6 fatty acid desaturase” encoded by a nucleic acid that hybridizes to the “Delta-6 fatty acid desaturase” nucleic acid or its complement under low stringency conditions, and/or

[0849] (xi) “ENSG00000144840” (SEQ ID No:79) or a functionally active derivative thereof, or a functionally active fragment thereof, or a homologue thereof, or a variant of “ENSG00000144840” encoded by a nucleic acid that hybridizes to the “ENSG00000144840” nucleic acid or its complement under low stringency conditions, and/or

[0850] (xii) “FLJ13977” (SEQ ID No:81) or a functionally active derivative thereof, or a functionally active fragment thereof, or a homologue thereof, or a variant of “FLJ13977” encoded by a nucleic acid that hybridizes to the “FLJ13977” nucleic acid or its complement under low stringency conditions, and/or

[0851] (xiii) “FLJ20342” (SEQ ID No:56) or a functionally active derivative thereof, or a functionally active fragment thereof, or a homologue thereof, or a variant of “FLJ20342” encoded by a nucleic acid that hybridizes to the “FLJ20342” nucleic acid or its complement under low stringency conditions, and/or

[0852] (xiv) “FLJ20481” (SEQ ID No:82) or a functionally active derivative thereof, or a functionally active fragment thereof, or a homologue thereof, or a variant of “FLJ20481” encoded by a nucleic acid that hybridizes to the “FLJ20481” nucleic acid or its complement under low stringency conditions, and/or

[0853] (xv) “FLJ22390” (SEQ ID No:84) or a functionally active derivative thereof, or a functionally active fragment thereof, or a homologue thereof, or a variant of “FLJ22390” encoded by a nucleic acid that hybridizes to the “FLJ22390” nucleic acid or its complement under low stringency conditions, and/or

[0854] (xvi) “Hypothetical protein tyrosine phosphatase ensg00001149185” (SEQ ID No:86) or a functionally active derivative thereof, or a functionally active fragment thereof, or a homologue thereof, or a variant of “Hypothetical protein tyrosine phosphatase ensg00000149185” encoded by a nucleic acid that hybridizes to the “Hypothetical protein tyrosine phosphatase ensg00000149185” nucleic acid or its complement under low stringency conditions, and/or

[0855] (xvii) “ICAM-2” (SEQ ID No:87) or a functionally active derivative thereof, or a functionally active fragment thereof, or a homologue thereof, or a variant of “ICAM-2” encoded by a nucleic acid that hybridizes to the “ICAM-2” nucleic acid or its complement under low stringency conditions, and/or

[0856] (xviii) “KIAA1181” (SEQ ID No:88) or a functionally active derivative thereof, or a functionally active fragment thereof, or a homologue thereof, or a variant of “KIAA1181” encoded by a nucleic acid that hybridizes to the “KIAA1181” nucleic acid or its complement under low stringency conditions, and/or

[0857] (xix) “KIAA1533” (SEQ ID No:89) or a functionally active derivative thereof, or a functionally active fragment thereof, or a homologue thereof, or a variant of “KIAA1533” encoded by a nucleic acid that hybridizes to the “KIAA1533” nucleic acid or its complement under low stringency conditions, and/or

[0858] (xx) “Mesenchymal stem cell protein DSCD75” (SEQ ID No:91) or a functionally active derivative thereof, or a functionally active fragment thereof, or a homologue thereof, or a variant of “Mesenchymal stem cell protein DSCD75” encoded by a nucleic acid that hybridizes to the “Mesenchymal stem cell protein DSCD75” nucleic acid or its complement under low stringency conditions, and/or

[0859] (xxi) “NICE-3” (SEQ ID No:58) or a functionally active derivative thereof, or a functionally active fragment thereof, or a homologue thereof, or a variant of “NICE-3” encoded by a nucleic acid that hybridizes to the “NICE-3” nucleic acid or its complement under low stringency conditions, and/or

[0860] (xxii) “Neurotrypsin” (SEQ ID No:92) or a functionally active derivative thereof, or a functionally active fragment thereof, or a homologue thereof, or a variant of “Neurotrypsin” encoded by a nucleic acid that hybridizes to the “Neurotrypsin” nucleic acid or its complement under low stringency conditions, and/or

[0861] (xxiii) “Nicastrin” (SEQ ID No:9) or a functionally active derivative thereof, or a functionally active fragment thereof, or a homologue thereof, or a variant of “Nicastrin” encoded by a nucleic acid that hybridizes to the “Nicastrin” nucleic acid or its complement under low stringency conditions, and/or

[0862] (xxiv) “PP1, regulatory subunit 15B” (SEQ ID No:93) or a functionally active derivative thereof, or a functionally active fragment thereof, or a homologue thereof, or a variant of “PP1, regulatory subunit 15B” encoded by a nucleic acid that hybridizes to the “PP1, regulatory subunit 15B” nucleic acid or its complement under low stringency conditions, and/or

[0863] (xxv) “Pen-2” (SEQ ID No:10) or a functionally active derivative thereof, or a functionally active fragment thereof, or a homologue thereof, or a variant of “Pen-2” encoded by a nucleic acid that hybridizes to the “Pen-2” nucleic acid or its complement under low stringency conditions, and/or

[0864] (xxvi) “Presenilin-1” (SEQ ID No:14) or a functionally active derivative thereof, or a functionally active fragment thereof, or a homologue thereof, or a variant of “Presenilin-1” encoded by a nucleic acid that hybridizes to the “Presenilin-1” nucleic acid or its complement under low stringency conditions, and/or

[0865] (xxvii) “Presenilin-2” (SEQ ID No:66) or a functionally active derivative thereof, or a functionally active fragment thereof, or a homologue thereof, or a variant of “Presenilin-2” encoded by a nucleic acid that hybridizes to the “Presenilin-2” nucleic acid or its complement under low stringency conditions, and/or

[0866] (xxviii) “Protein amplified in osteosarcoma (OS-9)” (SEQ ID No:94) or a functionally active derivative thereof, or a functionally active fragment thereof, or a homologue thereof, or a variant of “Protein amplified in osteosarcoma (OS-9)” encoded by a nucleic acid that hybridizes to the “Protein amplified in osteosarcoma (OS-9)” nucleic acid or its complement under low stringency conditions, and/or

[0867] (xxix) “Protein similar to stromal cell-derived factor 2” (SEQ ID No:95) or a functionally active derivative thereof, or a functionally active fragment thereof, or a homologue thereof, or a variant of “Protein similar to stromal cell-derived factor 2” encoded by a nucleic acid that hybridizes to the “Protein similar to stromal cell-derived factor 2” nucleic acid or its complement under low stringency conditions, and/or

[0868] (xxx) “Protocadherin beta 8” (SEQ ID No:96) or a functionally active derivative thereof, or a functionally active fragment thereof, or a homologue thereof, or a variant of “Protocadherin beta 8” encoded by a nucleic acid that hybridizes to the “Protocadherin beta 8” nucleic acid or its complement under low stringency conditions, and/or

[0869] (xxxi) “REP8 protein” (SEQ ID No:97) or a functionally active derivative thereof, or a functionally active fragment thereof, or a homologue thereof, or a variant of “REP8 protein” encoded by a nucleic acid that hybridizes to the “REP8 protein” nucleic acid or its complement under low stringency conditions, and/or

[0870] (xxxii) “RING finger protein 5” (SEQ ID No:98) or a functionally active derivative thereof, or a functionally active fragment thereof, or a homologue thereof, or a variant of “RING finger protein 5” encoded by a nucleic acid that hybridizes to the “RING finger protein 5” nucleic acid or its complement under low stringency conditions, and/or

[0871] (xxxiii) “Retinal short-chain dehydrogenase/reductase retSDR2” (SEQ ID No:99) or a functionally active derivative thereof, or a functionally active fragment thereof, or a homologue thereof, or a variant of “Retinal short-chain dehydrogenase/reductase retSDR2” encoded by a nucleic acid that hybridizes to the “Retinal short-chain dehydrogenase/reductase retSDR2” nucleic acid or its complement under low stringency conditions, and/or

[0872] (xxxiv) “Stromal cell-derived factor 2-like 1” (SEQ ID No:100) or a functionally active derivative thereof, or a functionally active fragment thereof, or a homologue thereof, or a variant of “Stromal cell-derived factor 2-like 1” encoded by a nucleic acid that hybridizes to the “Stromal cell-derived factor 2-like 1” nucleic acid or its complement under low stringency conditions, and/or

[0873] (xxxv) “Thioredoxin domain-containing protein” (SEQ ID No:101) or a functionally active derivative thereof, or a functionally active fragment thereof, or a homologue thereof, or a variant of “Thioredoxin domain-containing protein” encoded by a nucleic acid that hybridizes to the “Thioredoxin domain-containing protein” nucleic acid or its complement under low stringency conditions, and/or

[0874] (xxxvi) “Voltage-dependent anion channel 1” (SEQ ID No:102) or a functionally active derivative thereof, or a functionally active fragment thereof, or a homologue thereof, or a variant of “Voltage-dependent anion channel 1” encoded by a nucleic acid that hybridizes to the “Voltage-dependent anion channel 1” nucleic acid or its complement under low stringency conditions, is present in the complex.

32. The method of any of No. 26-31, wherein said method is a method of screening for a drug for treatment or prevention of a disease or disorder such as neurodegenerative diseases such as Alzheimer's disease and related neurodegenerative disorders.

[0875] 33. Use of a molecule that modulates the amount of, activity of, or the protein components of the complex of any one of No. 1-8 for the manufacture of a medicament for the treatment or prevention of a disease or disorder such as neurodegenerative diseases such as Alzheimer's disease and related neurodegenerative disorders.

[0876] 34. A method for the production of a pharmaceutical composition comprising carrying out the method of any of No. 1-8 to identify a molecule that modulates the function, activity, composition or formation of said complex, and further comprising mixing the identified molecule with a pharmaceutically acceptable carrier.

[0877] 35. A method for diagnosing or screening for the presence of a disease or disorder or a predisposition for developing a disease or disorder in a subject, which disease or disorder is characterized by an aberrant amount of, activity of, or component composition of, or intracellular localization of the complex of any one of the No. 1-8, comprising determining the amount of, activity of, protein components of, and/or intracellular localization of, said complex and/or the transcription level of a gene dependent on the complex and/or the abundance and/or activity of a protein or protein complex dependent on the function of the complex and/or product of a gene dependent on the complex in a comparative sample derived from a subject, wherein a difference in said amount, activity, or protein components of, said complex in an analogous sample from a subject not having the disease or disorder or predisposition indicates the presence in the subject of the disease or disorder or predisposition in the subject.

36. The method of No. 35, wherein the amount of said complex is determined.

37. The method of No. 35, wherein the activity of said complex is determined.

[0878] 38. The method of No. 37, wherein said determining step comprises isolating from the subject said complex to produce said isolated complex and contacting said isolated complex in the presence or absence of a candidate molecule with a substrate of said complex and determining whether said substrate is processed in the absence of the candidate molecule and whether the processing of said substrate is modified in the presence of said candidate molecule.

39. The method of No. 35, wherein the amount of the individual protein components of said complex is determined.

40. The method of No. 39, wherein said determining step comprises determining whether

[0879] (i) “18 kDa microsomal signal peptidase subunit” (SEQ ID No:53) or a functionally active derivative thereof, or a functionally active fragment thereof, or a homologue thereof, or a variant of “18 kDa microsomal signal peptidase subunit” encoded by a nucleic acid that hybridizes to the “18 kDa microsomal signal peptidase subunit” nucleic acid or its complement under low stringency conditions, and/or

[0880] (ii) “25 kDa microsomal signal peptidase subunit” (SEQ ID No:119) or a functionally active derivative thereof, or a functionally active fragment thereof, or a homologue thereof, or a variant of “25 kDa microsomal signal peptidase subunit” encoded by a nucleic acid that hybridizes to the “25 kDa microsomal signal peptidase subunit” nucleic acid or its complement under low stringency conditions, and/or

[0881] (iii) “ATP-binding cassette, sub-family A, member 3” (SEQ ID No:103) or a functionally active derivative thereof, or a functionally active fragment thereof, or a homologue thereof, or a variant of “ATP-binding cassette, sub-family A, member 3” encoded by a nucleic acid that hybridizes to the “ATP-binding cassette, subfamily A, member 3” nucleic acid or its complement under low stringency conditions, and/or

[0882] (iv) “Aph-1a” (SEQ ID No:1) or a functionally active derivative thereof, or a functionally active fragment thereof, or a homologue thereof, or a variant of “Aph-1a” encoded by a nucleic acid that hybridizes to the “Aph-1a” nucleic acid or its complement under low stringency conditions, and/or

[0883] (v) “BACE1” (SEQ ID No:68) or a functionally active derivative thereof, or a functionally active fragment thereof, or a homologue thereof, or a variant of “BACE1” encoded by a nucleic acid that hybridizes to the “BACE1” nucleic acid or its complement under low stringency conditions, and/or

[0884] (vi) “BSCv protein” (SEQ ID No:70) or a functionally active derivative thereof, or a functionally active fragment thereof, or a homologue thereof, or a variant of “BSCv protein” encoded by a nucleic acid that hybridizes to the “BSCv protein” nucleic acid or its complement under low stringency conditions, and/or

[0885] (vii) “CGI-13” (SEQ ID No:72) or a functionally active derivative thereof, or a functionally active fragment thereof, or a homologue thereof, or a variant of “CGI-13” encoded by a nucleic acid that hybridizes to the “CGI-13” nucleic acid or its complement under low stringency conditions, and/or

[0886] (viii) “Casein kinase II beta chain” (SEQ ID No:74) or a functionally active derivative thereof, or a functionally active fragment thereof, or a homologue thereof, or a variant of “Casein kinase II beta chain” encoded by a nucleic acid that hybridizes to the “Casein kinase II beta chain” nucleic acid or its complement under low stringency conditions, and/or

[0887] (ix) “Cathepsin B” (SEQ ID No:75) or a functionally active derivative thereof, or a functionally active fragment thereof, or a homologue thereof, or a variant of “Cathepsin B” encoded by a nucleic acid that hybridizes to the “Cathepsin B” nucleic acid or its complement under low stringency conditions, and/or

[0888] (x) “Delta-6 fatty acid desaturase” (SEQ ID No:76) or a functionally active derivative thereof, or a functionally active fragment thereof, or a homologue thereof, or a variant of “Delta-6 fatty acid desaturase” encoded by a nucleic acid that hybridizes to the “Delta-6 fatty acid desaturase” nucleic acid or its complement under low stringency conditions, and/or

[0889] (xi) “ENSG00000144840” (SEQ ID No:79) or a functionally active derivative thereof, or a functionally active fragment thereof, or a homologue thereof, or a variant of “ENSG00000144840” encoded by a nucleic acid that hybridizes to the “ENSG0000014840” nucleic acid or its complement under low stringency conditions, and/or

[0890] (xii) “FLJ13977” (SEQ ID No:81) or a functionally active derivative thereof, or a functionally active fragment thereof, or a homologue thereof, or a variant of “FLJ13977” encoded by a nucleic acid that hybridizes to the “FLJ13977” nucleic acid or its complement under low stringency conditions, and/or

[0891] (xiii) “FLJ20342” (SEQ ID No:56) or a functionally active derivative thereof, or a functionally active fragment thereof, or a homologue thereof, or a variant of “FLJ20342” encoded by a nucleic acid that hybridizes to the “FLJ20342” nucleic acid or its complement under low stringency conditions, and/or

[0892] (xiv) “FLJ20481” (SEQ ID No:82) or a functionally active derivative thereof, or a functionally active fragment thereof, or a homologue thereof, or a variant of “FLJ20481” encoded by a nucleic acid that hybridizes to the “FLJ20481” nucleic acid or its complement under low stringency conditions, and/or

[0893] (xv) “FLJ22390” (SEQ ID No:84) or a functionally active derivative thereof, or a functionally active fragment thereof, or a homologue thereof, or a variant of “FLJ22390” encoded by a nucleic acid that hybridizes to the “FLJ22390” nucleic acid or its complement under low stringency conditions, and/or

[0894] (xvi) “Hypothetical protein tyrosine phosphatase ensg00000149185” (SEQ ID No:86) or a functionally active derivative thereof, or a functionally active fragment thereof, or a homologue thereof, or a variant of “Hypothetical protein tyrosine phosphatase ensg00000149185” encoded by a nucleic acid that hybridizes to the “Hypothetical protein tyrosine phosphatase ensg00000149185” nucleic acid or its complement under low stringency conditions, and/or

[0895] (xvii) “ICAM-2” (SEQ ID No:87) or a functionally active derivative thereof, or a functionally active fragment thereof, or a homologue thereof, or a variant of “ICAM-2” encoded by a nucleic acid that hybridizes to the “ICAM-2” nucleic acid or its complement under low stringency conditions, and/or

[0896] (xviii) “KIAA1181” (SEQ ID No:88) or a functionally active derivative thereof, or a functionally active fragment thereof, or a homologue thereof, or a variant of “KIAA1181” encoded by a nucleic acid that hybridizes to the “KIAA1181” nucleic acid or its complement under low stringency conditions, and/or

[0897] (xix) “KIAA1533” (SEQ ID No:89) or a functionally active derivative thereof, or a functionally active fragment thereof, or a homologue thereof, or a variant of “KIAA1533” encoded by a nucleic acid that hybridizes to the “KIAA1533” nucleic acid or its complement under low stringency conditions, and/or

[0898] (xx) “Mesenchymal stem cell protein DSCD75” (SEQ ID No:91) or a functionally active derivative thereof, or a functionally active fragment thereof, or a homologue thereof, or a variant of “Mesenchymal stem cell protein DSCD75” encoded by a nucleic acid that hybridizes to the “Mesenchymal stem cell protein DSCD75” nucleic acid or its complement under low stringency conditions, and/or

[0899] (xxi) “NICE-3” (SEQ ID No:58) or a functionally active derivative thereof, or a functionally active fragment thereof, or a homologue thereof, or a variant of “NICE-3” encoded by a nucleic acid that hybridizes to the “NICE-3” nucleic acid or its complement under low stringency conditions, and/or

[0900] (xxii) “Neurotrypsin” (SEQ ID No:92) or a functionally active derivative thereof, or a functionally active fragment thereof, or a homologue thereof, or a variant of “Neurotrypsin” encoded by a nucleic acid that hybridizes to the “Neurotrypsin” nucleic acid or its complement under low stringency conditions, and/or

[0901] (xxiii) “Nicastrin” (SEQ ID No:9) or a functionally active derivative thereof, or a functionally active fragment thereof, or a homologue thereof, or a variant of “Nicastrin” encoded by a nucleic acid that hybridizes to the “Nicastrin” nucleic acid or its complement under low stringency conditions, and/or

[0902] (xxiv) “PP1, regulatory subunit 15B” (SEQ ID No:93) or a functionally active derivative thereof, or a functionally active fragment thereof, or a homologue thereof, or a variant of “PP1, regulatory subunit 15B” encoded by a nucleic acid that hybridizes to the “PP1, regulatory subunit 15B” nucleic acid or its complement under low stringency conditions, and/or

[0903] (xxv) “Pen-2” (SEQ ID No:10) or a functionally active derivative thereof, or a functionally active fragment thereof, or a homologue thereof, or a variant of “Pen-2” encoded by a nucleic acid that hybridizes to the “Pen-2” nucleic acid or its complement under low stringency conditions, and/or

[0904] (xxvi) “Presenilin-1” (SEQ ID No:14) or a functionally active derivative thereof, or a functionally active fragment thereof, or a homologue thereof, or a variant of “Presenilin-1” encoded by a nucleic acid that hybridizes to the “Presenilin-1” nucleic acid or its complement under low stringency conditions, and/or

[0905] (xxvii) “Presenilin-2” (SEQ ID No:66) or a functionally active derivative thereof, or a functionally active fragment thereof, or a homologue thereof, or a variant of “Presenilin-2” encoded by a nucleic acid that hybridizes to the “Presenilin-2” nucleic acid or its complement under low stringency conditions, and/or

[0906] (xxviii) “Protein amplified in osteosarcoma (OS-9)” (SEQ ID No:94) or a functionally active derivative thereof, or a functionally active fragment thereof, or a homologue thereof, or a variant of “Protein amplified in osteosarcoma (OS-9)” encoded by a nucleic acid that hybridizes to the “Protein amplified in osteosarcoma (OS-9)” nucleic acid or its complement under low stringency conditions, and/or

[0907] (xxix) “Protein similar to stromal cell-derived factor 2” (SEQ ID No:95) or a functionally active derivative thereof, or a functionally active fragment thereof, or a homologue thereof, or a variant of “Protein similar to stromal cell-derived factor 2” encoded by a nucleic acid that hybridizes to the “Protein similar to stromal cell-derived factor 2” nucleic acid or its complement under low stringency conditions, and/or

[0908] (xxx) “Protocadherin beta 8” (SEQ ID No:96) or a functionally active derivative thereof, or a functionally active fragment thereof, or a homologue thereof, or a variant of “Protocadherin beta 8” encoded by a nucleic acid that hybridizes to the “Protocadherin beta 8” nucleic acid or its complement under low stringency conditions, and/or

[0909] (xxxi) “REP8 protein” (SEQ ID No:97) or a functionally active derivative thereof, or a functionally active fragment thereof, or a homologue thereof, or a variant of “REP8 protein” encoded by a nucleic acid that hybridizes to the “REP8 protein” nucleic acid or its complement under low stringency conditions, and/or

[0910] (xxxii) “RING finger protein 5” (SEQ ID No:98) or a functionally active derivative thereof, or a functionally active fragment thereof, or a homologue thereof, or a variant of “RING finger protein 5” encoded by a nucleic acid that hybridizes to the “RING finger protein S” nucleic acid or its complement under low stringency conditions, and/or

[0911] (xxxiii) “Retinal short-chain dehydrogenase/reductase retSDR2” (SEQ ID No:99) or a functionally active derivative thereof, or a functionally active fragment thereof, or a homologue thereof, or a variant of “Retinal short-chain dehydrogenase/reductase retSDR2” encoded by a nucleic acid that hybridizes to the “Retinal short-chain dehydrogenase/reductase retSDR2” nucleic acid or its complement under low stringency conditions, and/or

[0912] (xxxiv) “Stromal cell-derived factor 2-like 1” (SEQ ID No:100) or a functionally active derivative thereof, or a functionally active fragment thereof, or a homologue thereof, or a variant of “Stromal cell-derived factor 2-like 1” encoded by a nucleic acid that hybridizes to the “Stromal cell-derived factor 2-like 1” nucleic acid or its complement under low stringency conditions, and/or

[0913] (xxxv) “Thioredoxin domain-containing protein” (SEQ ID No:101) or a functionally active derivative thereof, or a functionally active fragment thereof, or a homologue thereof, or a variant of “Thioredoxin domain-containing protein” encoded by a nucleic acid that hybridizes to the “Thioredoxin domain-containing protein” nucleic acid or its complement under low stringency conditions, and/or

[0914] (xxxvi) “Voltage-dependent anion channel 1” (SEQ ID No:102) or a functionally active derivative thereof, or a functionally active fragment thereof, or a homologue thereof, or a variant of “Voltage-dependent anion channel 1” encoded by a nucleic acid that hybridizes to the “Voltage-dependent anion channel 1” nucleic acid or its complement under low stringency conditions, is present in the complex.

[0915] 41. The complex of any one of No. 1-8, or proteins of No. 13 or the antibody or fragment of No. 17, for use in a method of diagnosing a disease or disorder such as neurodegenerative diseases such as Alzheimer's disease and related neurodegenerative disorders.

[0916] 42. A method for treating or preventing a disease or disorder characterized by an aberrant amount of, activity or component composition of or intracellular localization of, the complex of anyone of No. 1-8, comprising administering to a subject in need of such treatment or prevention a therapeutically effective amount of one or more molecules that modulate the amount of, the production of Abeta-40 and Abeta-42 peptides by ELISA (e.g. by modifying the expression of one or several interacting proteins in cells by means of RNAi (siRNA) and/or plasmids encoding the interacting protein(s)), the production of C-terminal APP fragments in cell lines or transgenic animals by western blot (e.g. by modifying the expression of one or several interacting proteins in cells by means of RNAi (siRNA) and/or plasmids encoding the interacting protein(s)), the proteolytic activity of beta- or gamma secretases towards bacterially expressed APP fragments in vitro (e.g. by modifying the expression of one or several interacting proteins in cells by means of RNAi (siRNA) and/or plasmids encoding the interacting protein(s)) or transactivation of a Gal4-driven reporter gene (e.g. by modifying the expression of one or several interacting proteins in cells by means of RNAi (siRNA) and/or plasmids encoding the interacting protein(s)), or protein components of, said complex.

43. The method according to No. 42, wherein said disease or disorder involves decreased levels of the amount or activity of said complex.

44. The method according to No. 42, wherein said disease or disorder involves increased levels of the amount or activity of said complex.

45. Complex of any of No. 1-8 and/or protein selected from the following proteins:

[0917] (i) “18 kDa microsomal signal peptidase subunit” (SEQ ID No:53) or a functionally active derivative thereof, or a functionally active fragment thereof, or a homologue thereof, or a variant of “18 kDa microsomal signal peptidase subunit” encoded by a nucleic acid that hybridizes to the “18 kDa microsomal signal peptidase subunit” nucleic acid or its complement under low stringency conditions,

[0918] (ii) “25 kDa microsomal signal peptidase subunit” (SEQ ID No:119) or a functionally active derivative thereof, or a functionally active fragment thereof, or a homologue thereof, or a variant of “25 kDa microsomal signal peptidase subunit” encoded by a nucleic acid that hybridizes to the “25 kDa microsomal signal peptidase subunit” nucleic acid or its complement under low stringency conditions,

[0919] (iii) “ATP-binding cassette, sub-family A, member 3” (SEQ ID No:103) or a functionally active derivative thereof, or a functionally active fragment thereof, or a homologue thereof, or a variant of “ATP-binding cassette, sub-family A, member 3” encoded by a nucleic acid that hybridizes to the “ATP-binding cassette, sub-family A, member 3” nucleic acid or its complement under low stringency conditions,

[0920] (iv) “Aph-1a” (SEQ ID No:1) or a functionally active derivative thereof, or a functionally active fragment thereof, or a homologue thereof, or a variant of “Aph-1a” encoded by a nucleic acid that hybridizes to the “Aph-1a” nucleic acid or its complement under low stringency conditions,

[0921] (v) “BACE1” (SEQ ID No:68) or a functionally active derivative thereof, or a functionally active fragment thereof, or a homologue thereof, or a variant of “BACE1” encoded by a nucleic acid that hybridizes to the “BACE I” nucleic acid or its complement under low stringency conditions,

[0922] (vi) “BSCv protein” (SEQ ID No:70) or a functionally active derivative thereof, or a functionally active fragment thereof, or a homologue thereof, or a variant of “BSCv protein” encoded by a nucleic acid that hybridizes to the “BSCv protein” nucleic acid or its complement under low stringency conditions,

[0923] (vii) “CGI-13” (SEQ ID No:72) or a functionally active derivative thereof, or a functionally active fragment thereof, or a homologue thereof, or a variant of “CGI-13” encoded by a nucleic acid that hybridizes to the “CGI-13” nucleic acid or its complement under low stringency conditions,

[0924] (viii) “Casein kinase II beta chain” (SEQ ID No:74) or a functionally active derivative thereof, or a functionally active fragment thereof, or a homologue thereof, or a variant of “Casein kinase II beta chain” encoded by a nucleic acid that hybridizes to the “Casein kinase II beta chain” nucleic acid or its complement under low stringency conditions,

[0925] (ix) “Cathepsin B” (SEQ ID No:75) or a functionally active derivative thereof, or a functionally active fragment thereof, or a homologue thereof, or a variant of “Cathepsin B” encoded by a nucleic acid that hybridizes to the “Cathepsin B” nucleic acid or its complement under low stringency conditions,

[0926] (x) “Delta-6 fatty acid desaturase” (SEQ ID No:76) or a functionally active derivative thereof, or a functionally active fragment thereof, or a homologue thereof, or a variant of “Delta-6 fatty acid desaturase” encoded by a nucleic acid that hybridizes to the “Delta-6 fatty acid desaturase” nucleic acid or its complement under low stringency conditions,

[0927] (xi) “ENSG00000144840” (SEQ ID No:79) or a functionally active derivative thereof, or a functionally active fragment thereof, or a homologue thereof, or a variant of “ENSG00000144840” encoded by a nucleic acid that hybridizes to the “ENSG00000144840” nucleic acid or its complement under low stringency conditions,

[0928] (xii) “FLJ13977” (SEQ ID No:81) or a functionally active derivative thereof, or a functionally active fragment thereof, or a homologue thereof, or a variant of “FLJ13977” encoded by a nucleic acid that hybridizes to the “FLJ13977” nucleic acid or its complement under low stringency conditions,

[0929] (xiii) “FLJ20342” (SEQ ID No:56) or a functionally active derivative thereof, or a functionally active fragment thereof, or a homologue thereof, or a variant of “FLJ20342” encoded by a nucleic acid that hybridizes to the “FLJ20342” nucleic acid or its complement under low stringency conditions,

[0930] (xiv) “FLJ20481” (SEQ ID No:82) or a functionally active derivative thereof, or a functionally active fragment thereof, or a homologue thereof, or a variant of “FLJ20481” encoded by a nucleic acid that hybridizes to the “FLJ20481” nucleic acid or its complement under low stringency conditions,

[0931] (xv) “FLJ22390” (SEQ ID No:84) or a functionally active derivative thereof, or a functionally active fragment thereof, or a homologue thereof, or a variant of “FLJ22390” encoded by a nucleic acid that hybridizes to the “FLJ22390” nucleic acid or its complement under low stringency conditions,

[0932] (xvi) “Hypothetical protein tyrosine phosphatase ensg00000149185” (SEQ ID No:86) or a functionally active derivative thereof, or a functionally active fragment thereof, or a homologue thereof, or a variant of “Hypothetical protein tyrosine phosphatase ensg00000149185” encoded by a nucleic acid that hybridizes to the “Hypothetical protein tyrosine phosphatase ensg00000149185” nucleic acid or its complement under low stringency conditions,

[0933] (xvii) “ICAM-2” (SEQ ID No:87) or a functionally active derivative thereof, or a functionally active fragment thereof, or a homologue thereof, or a variant of “ICAM-2” encoded by a nucleic acid that hybridizes to the “ICAM-2” nucleic acid or its complement under low stringency conditions,

[0934] (xviii) “KIAA11” (SEQ ID No:88) or a functionally active derivative thereof, or a functionally active fragment thereof, or a homologue thereof, or a variant of “KIAA1181” encoded by a nucleic acid that hybridizes to the “KIAA1181” nucleic acid or its complement under low stringency conditions,

[0935] (xix) “KIAA1533” (SEQ ID No:89) or a functionally active derivative thereof, or a functionally active fragment thereof, or a homologue thereof, or a variant of “KIAA1533” encoded by a nucleic acid that hybridizes to the “KIAA1533” nucleic acid or its complement under low stringency conditions,

[0936] (xx) “Mesenchymal stem cell protein DSCD75” (SEQ ID No:91) or a functionally active derivative thereof, or a functionally active fragment thereof, or a homologue thereof, or a variant of “Mesenchymal stem cell protein DSCD75” encoded by a nucleic acid that hybridizes to the “Mesenchymal stem cell protein DSCD75” nucleic acid or its complement under low stringency conditions,

[0937] (xxi) “NICE-3” (SEQ ID No:58) or a functionally active derivative thereof, or a functionally active fragment thereof, or a homologue thereof, or a variant of “NICE-3” encoded by a nucleic acid that hybridizes to the “NICE-3” nucleic acid or its complement under low stringency conditions,

[0938] (xxii) “Neurotrypsin” (SEQ ID No:92) or a functionally active derivative thereof, or a functionally active fragment thereof, or a homologue thereof, or a variant of “Neurotrypsin” encoded by a nucleic acid that hybridizes to the “Neurotrypsin” nucleic acid or its complement under low stringency conditions,

[0939] (xxiii) “Nicastrin” (SEQ ID No:9) or a functionally active derivative thereof, or a functionally active fragment thereof, or a homologue thereof, or a variant of “Nicastrin” encoded by a nucleic acid that hybridizes to the “Nicastrin” nucleic acid or its complement under low stringency conditions,

[0940] (xxiv) “PP1, regulatory subunit 15B” (SEQ ID No:93) or a functionally active derivative thereof, or a functionally active fragment thereof, or a homologue thereof, or a variant of “PP1, regulatory subunit 15B” encoded by a nucleic acid that hybridizes to the “PP1, regulatory subunit 15B” nucleic acid or its complement under low stringency conditions,

[0941] (xxv) “Pen-2” (SEQ ID No:10) or a functionally active derivative thereof, or a functionally active fragment thereof, or a homologue thereof, or a variant of “Pen-2” encoded by a nucleic acid that hybridizes to the “Pen-2” nucleic acid or its complement under low stringency conditions,

[0942] (xxvi) “Presenilin-1” (SEQ ID No:14) or a functionally active derivative thereof, or a functionally active fragment thereof, or a homologue thereof, or a variant of “Presenilin-1” encoded by a nucleic acid that hybridizes to the “Presenilin-1” nucleic acid or its complement under low stringency conditions,

[0943] (xxvii) “Presenilin-2” (SEQ ID No:66) or a functionally active derivative thereof, or a functionally active fragment thereof, or a homologue thereof, or a variant of “Presenilin-2” encoded by a nucleic acid that hybridizes to the “Presenilin-2” nucleic acid or its complement under low stringency conditions,

[0944] (xxviii) “Protein amplified in osteosarcoma (OS-9)” (SEQ ID No:94) or a functionally active derivative thereof, or a functionally active fragment thereof, or a homologue thereof, or a variant of “Protein amplified in osteosarcoma (OS-9)” encoded by a nucleic acid that hybridizes to the “Protein amplified in osteosarcoma (OS-9)” nucleic acid or its complement under low stringency conditions,

[0945] (xxix) “Protein similar to stromal cell-derived factor 2” (SEQ ID No:95) or a functionally active derivative thereof, or a functionally active fragment thereof, or a homologue thereof, or a variant of “Protein similar to stromal cell-derived factor 2” encoded by a nucleic acid that hybridizes to the “Protein similar to stromal cell-derived factor 2” nucleic acid or its complement under low stringency conditions,

[0946] (xxx) “Protocadherin beta 8” (SEQ ID No:96) or a functionally active derivative thereof, or a functionally active fragment thereof, or a homologue thereof, or a variant of “Protocadherin beta 8” encoded by a nucleic acid that hybridizes to the “Protocadherin beta 8” nucleic acid or its complement under low stringency conditions,

[0947] (xxxi) “REP8 protein” (SEQ ID No:97) or a functionally active derivative thereof, or a functionally active fragment thereof, or a homologue thereof, or a variant of “REP8 protein” encoded by a nucleic acid that hybridizes to the “REP8 protein” nucleic acid or its complement under low stringency conditions,

[0948] (xxxii) “RING finger protein 5” (SEQ ID No:98) or a functionally active derivative thereof, or a functionally active fragment thereof, or a homologue thereof, or a variant of “RING finger protein 5” encoded by a nucleic acid that hybridizes to the “RING finger protein 5” nucleic acid or its complement under low stringency conditions,

[0949] (xxxiii) “Retinal short-chain dehydrogenase/reductase retSDR2” (SEQ ID No:99) or a functionally active derivative thereof, or a functionally active fragment thereof, or a homologue thereof, or a variant of “Retinal short-chain dehydrogenase/reductase retSDR2” encoded by a nucleic acid that hybridizes to the “Retinal short-chain dehydrogenase/reductase retSDR2” nucleic acid or its complement under low stringency conditions,

[0950] (xxxiv) “Stromal cell-derived factor 2-like 1” (SEQ ID No:100) or a functionally active derivative thereof, or a functionally active fragment thereof, or a homologue thereof, or a variant of “Stromal cell-derived factor 2-like 1” encoded by a nucleic acid that hybridizes to the “Stromal cell-derived factor 2-like 1” nucleic acid or its complement under low stringency conditions,

[0951] (xxxv) “Thioredoxin domain-containing protein” (SEQ ID No:101) or a functionally active derivative thereof, or a functionally active fragment thereof, or a homologue thereof, or a variant of “Thioredoxin domain-containing protein” encoded by a nucleic acid that hybridizes to the “Thioredoxin domain-containing protein” nucleic acid or its complement under low stringency conditions, and/or (xxxvi) “Voltage-dependent anion channel 1” (SEQ ID No:102) or a functionally active derivative thereof, or a functionally active fragment thereof, or a homologue thereof, or a variant of “Voltage-dependent anion channel 1” encoded by a nucleic acid that hybridizes to the “Voltage-dependent anion channel 1” nucleic acid or its complement under low stringency conditions, as a target for an active agent of a pharmaceutical, preferably a drug target in the treatment or prevention of a disease or disorder such as neurodegenerative diseases such as Alzheimer's disease and related neurodegenerative disorders.

[0952] The present invention further relates to the following embodiments of the Nicastrin-complex (b):

1. A protein complex selected from complex (I) and comprising

(a) at least one first protein selected from the group consisting of:

[0953] (i) “Aph-1a” (SEQ ID No:1) or a functionally active derivative thereof, or a functionally active fragment thereof, or a homolog thereof, or a variant of “Aph-1a” encoded by a nucleic acid that hybridizes to the “Aph-1a” nucleic acid or its complement under low stringency conditions,

[0954] (ii) “BACE1” (SEQ ID No:38) or a functionally active derivative thereof, or a functionally active fragment thereof, or a homolog thereof, or a variant of “BACE1” encoded by a nucleic acid that hybridizes to the “BACE1” nucleic acid or its complement under low stringency conditions,

[0955] (iii) “Nicastrin” (SEQ ID No:9) or a functionally active derivative thereof, or a functionally active fragment thereof, or a homolog thereof, or a variant of “Nicastrin” encoded by a nucleic acid that hybridizes to the “Nicastrin” nucleic acid or its complement under low stringency conditions,

[0956] (iv) “Pen-2” (SEQ ID No:10) or a functionally active derivative thereof, or a functionally active fragment thereof, or a homolog thereof, or a variant of “Pen-2” encoded by a nucleic acid that hybridizes to the “Pen-2” nucleic acid or its complement under low stringency conditions,

[0957] (v) “Presenilin-1” (SEQ ID No:14) or a functionally active derivative thereof, or a functionally active fragment thereof, or a homolog thereof, or a variant of “Presenilin-1” encoded by a nucleic acid that hybridizes to the “Presenilin-1” nucleic acid or its complement under low stringency conditions, and

[0958] (vi) “Presenilin-2” (SEQ ID No:66) or a functionally active derivative thereof, or a functionally active fragment thereof, or a homolog thereof, or a variant of “Presenilin-2” encoded by a nucleic acid that hybridizes to the “Presenilin-2” nucleic acid or its complement under low stringency conditions, and

(b) at least one second protein, which second protein is selected from the group consisting of:

[0959] (i) “18 kDa microsomal signal peptidase subunit” (SEQ ID No:53) or a functionally active derivative thereof, or a functionally active fragment thereof, or a homolog thereof, or a variant of “18 kDa microsomal signal peptidase subunit” encoded by a nucleic acid that hybridizes to the “18 kDa microsomal signal peptidase subunit” nucleic acid or its complement under low stringency conditions,

[0960] (ii) “25 kDa microsomal signal peptidase subunit” (SEQ ID No:119) or a functionally active derivative thereof, or a functionally active fragment thereof, or a homolog thereof, or a variant of “25 kDa microsomal signal peptidase subunit” encoded by a nucleic acid that hybridizes to the “25 kDa microsomal signal peptidase subunit” nucleic acid or its complement under low stringency conditions,

[0961] (iii) “ATP-binding cassette, sub-family A, member 3” (SEQ ID No:103) or a functionally active derivative thereof, or a functionally active fragment thereof, or a homolog thereof, or a variant of “ATP-binding cassette, sub-family A, member 3” encoded by a nucleic acid that hybridizes to the “ATP-binding cassette, sub-family A, member 3” nucleic acid or its complement under low stringency conditions,

[0962] (iv) “BSCv protein (FRAGMENT)” (SEQ ID No:70) or a functionally active derivative thereof, or a functionally active fragment thereof, or a homolog thereof, or a variant of “BSCv protein (FRAGMENT)” encoded by a nucleic acid that hybridizes to the “BSCv protein (FRAGMENT)” nucleic acid or its complement under low stringency conditions,

[0963] (v) “CAMK4” (SEQ ID No:104) or a functionally active derivative thereof, or a functionally active fragment thereof, or a homolog thereof, or a variant of “CAMK4” encoded by a nucleic acid that hybridizes to the “CAMK4” nucleic acid or its complement under low stringency conditions,

[0964] (vi) “CGI-13” (SEQ ID No:72) or a functionally active derivative thereof, or a functionally active fragment thereof, or a homolog thereof, or a variant of “CGI-13” encoded by a nucleic acid that hybridizes to the “CGI-13” nucleic acid or its complement under low stringency conditions,

[0965] (vii) “Casein kinase II beta chain” (SEQ ID No:74) or a functionally active derivative thereof, or a functionally active fragment thereof, or a homolog thereof, or a variant of “Casein kinase II beta chain” encoded by a nucleic acid that hybridizes to the “Casein kinase II beta chain” nucleic acid or its complement under low stringency conditions,

[0966] (viii) “Cathepsin B” (SEQ ID No:75) or a functionally active derivative thereof, or a functionally active fragment thereof, or a homolog thereof, or a variant of “Cathepsin B” encoded by a nucleic acid that hybridizes to the “Cathepsin B” nucleic acid or its complement under low stringency conditions,

[0967] (ix) “DCTN1” (SEQ ID No:106) or a functionally active derivative thereof, or a functionally active fragment thereof, or a homolog thereof, or a variant of “DCTN1” encoded by a nucleic acid that hybridizes to the “DCTN1” nucleic acid or its complement under low stringency conditions,

[0968] (x) “Delta-6 fatty acid desaturase” (SEQ ID No:76) or a functionally active derivative thereof, or a functionally active fragment thereof, or a homolog thereof, or a variant of “Delta-6 fatty acid desaturase” encoded by a nucleic acid that hybridizes to the “Delta-6 fatty acid desaturase” nucleic acid or its complement under low stringency conditions,

[0969] (xi) “ENSG00000144840” (SEQ ID No:79) or a functionally active derivative thereof, or a functionally active fragment thereof, or a homolog thereof, or a variant of “ENSG00000144840” encoded by a nucleic acid that hybridizes to the “ENSG00000144840” nucleic acid or its complement under low stringency conditions,

[0970] (xii) “FACL3” (SEQ ID No:108) or a functionally active derivative thereof, or a functionally active fragment thereof, or a homolog thereof, or a variant of “FACL3” encoded by a nucleic acid that hybridizes to the “FACL3” nucleic acid or its complement under low stringency conditions,

[0971] (xiii) “FACL4” (SEQ ID No:109) or a functionally active derivative thereof, or a functionally active fragment thereof, or a homolog thereof, or a variant of “FACL4” encoded by a nucleic acid that hybridizes to the “FACL4” nucleic acid or its complement under low stringency conditions,

[0972] (xiv) “FLJ13977” (SEQ ID No:81) or a functionally active derivative thereof, or a functionally active fragment thereof, or a homolog thereof, or a variant of “FLJ13977” encoded by a nucleic acid that hybridizes to the “FLJ13977” nucleic acid or its complement under low stringency conditions,

[0973] (xv) “FLJ20342” (SEQ ID No:56) or a functionally active derivative thereof, or a functionally active fragment thereof, or a homolog thereof, or a variant of “FLJ20342” encoded by a nucleic acid that hybridizes to the “FLJ20342” nucleic acid or its complement under low stringency conditions,

[0974] (xvi) “FLJ20481” (SEQ ID No:82) or a functionally active derivative thereof, or a functionally active fragment thereof, or a homolog thereof, or a variant of “FLJ20481” encoded by a nucleic acid that hybridizes to the “FLJ20481” nucleic acid or its complement under low stringency conditions,

[0975] (xvii) “FLJ22390” (SEQ ID No:84) or a functionally active derivative thereof, or a functionally active fragment thereof, or a homolog thereof, or a variant of “FLJ22390” encoded by a nucleic acid that hybridizes to the “FLJ22390” nucleic acid or its complement under low stringency conditions,

[0976] (xviii) “ICAM-2” (SEQ ID No:87) or a functionally active derivative thereof, or a functionally active fragment thereof, or a homolog thereof, or a variant of “ICAM-2” encoded by a nucleic acid that hybridizes to the “ICAM-2” nucleic acid or its complement under low stringency conditions,

[0977] (xix) “KIAA0095” (SEQ ID No:110) or a functionally active derivative thereof, or a functionally active fragment thereof, or a homolog thereof, or a variant of “KIAA0095” encoded by a nucleic acid that hybridizes to the “KIAA0095” nucleic acid or its complement under low stringency conditions,

[0978] (xx) “KIAA0922” (SEQ ID No:111) or a functionally active derivative thereof, or a functionally active fragment thereof, or a homolog thereof, or a variant of “KIAA0922” encoded by a nucleic acid that hybridizes to the “KIAA0922” nucleic acid or its complement under low stringency conditions,

[0979] (xxi) “KIAA1181 (FRAGMENT)” (SEQ ID No:88) or a functionally active derivative thereof, or a functionally active fragment thereof, or a homolog thereof, or a variant of “KIAA1181 (FRAGMENT)” encoded by a nucleic acid that hybridizes to the “KIAA1181 (FRAGMENT)” nucleic acid or its complement under low stringency conditions,

[0980] (xxii) “KIAA1533 (FRAGMENT)” (SEQ ID No:89) or a functionally active derivative thereof, or a functionally active fragment thereof, or a homolog thereof, or a variant of “KIAA1533 (FRAGMENT)” encoded by a nucleic acid that hybridizes to the “KIAA1533 (FRAGMENT)” nucleic acid or its complement under low stringency conditions,

[0981] (xxiii) “Mesenchymal stem cell protein DSCD75” (SEQ ID No:91) or a functionally active derivative thereof, or a functionally active fragment thereof, or a homolog thereof, or a variant of “Mesenchymal stem cell protein DSCD75” encoded by a nucleic acid that hybridizes to the “Mesenchymal stem cell protein DSCD75” nucleic acid or its complement under low stringency conditions,

[0982] (xxiv) “NICE-3” (SEQ ID No:58) or a functionally active derivative thereof, or a functionally active fragment thereof, or a homolog thereof, or a variant of “NICE-3” encoded by a nucleic acid that hybridizes to the “NICE-3” nucleic acid or its complement under low stringency conditions,

[0983] (xxv) “Neurotrypsin” (SEQ ID No:92) or a functionally active derivative thereof, or a functionally active fragment thereof, or a homolog thereof, or a variant of “Neurotrypsin” encoded by a nucleic acid that hybridizes to the “Neurotrypsin” nucleic acid or its complement under low stringency conditions,

[0984] (xxvi) “PAS domain containing serine/threonine kinase” (SEQ ID No:112) or a functionally active derivative thereof, or a functionally active fragment thereof, or a homolog thereof, or a variant of “PAS domain containing serine/threonine kinase” encoded by a nucleic acid that hybridizes to the “PAS domain containing serine/threonine kinase” nucleic acid or its complement under low stringency conditions,

[0985] (xxvii) “PP1, regulatory subunit 15B” (SEQ ID No:93) or a functionally active derivative thereof, or a functionally active fragment thereof, or a homolog thereof, or a variant of “PP1, regulatory subunit 15B” encoded by a nucleic acid that hybridizes to the “PP1, regulatory subunit 15B” nucleic acid or its complement under low stringency conditions,

[0986] (xxviii) “Protein amplified in osteosarcoma (OS-9)” (SEQ ID No:94) or a functionally active derivative thereof, or a functionally active fragment thereof, or a homolog thereof, or a variant of “Protein amplified in osteosarcoma (OS-9)” encoded by a nucleic acid that hybridizes to the “Protein amplified in osteosarcoma (OS-9)” nucleic acid or its complement under low stringency conditions,

[0987] (xxix) “Protein similar to stromal cell-derived factor 2” (SEQ ID No:95) or a functionally active derivative thereof, or a functionally active fragment thereof, or a homolog thereof, or a variant of “Protein similar to stromal cell-derived factor 2” encoded by a nucleic acid that hybridizes to the “Protein similar to stromal cell-derived factor 2” nucleic acid or its complement under low stringency conditions,

[0988] (xxx) “Protocadherin beta 8” (SEQ ID No:96) or a functionally active derivative thereof, or a functionally active fragment thereof, or a homolog thereof, or a variant of “Protocadherin beta 8” encoded by a nucleic acid that hybridizes to the “Protocadherin beta 8” nucleic acid or its complement under low stringency conditions,

[0989] (xxxi) “REP8 protein” (SEQ ID No:97) or a functionally active derivative thereof, or a functionally active fragment thereof, or a homolog thereof, or a variant of “REP8 protein” encoded by a nucleic acid that hybridizes to the “REP8 protein” nucleic acid or its complement under low stringency conditions,

[0990] (xxxii) “RING finger protein 5” (SEQ ID No:98) or a functionally active derivative thereof, or a functionally active fragment thereof, or a homolog thereof, or a variant of “RING finger protein 5” encoded by a nucleic acid that hybridizes to the “RING finger protein 5” nucleic acid or its complement under low stringency conditions,

[0991] (xxxiii) “Retinal short-chain dehydrogenase/reductase retSDR2” (SEQ ID No:99) or a functionally active derivative thereof, or a functionally active fragment thereof, or a homolog thereof, or a variant of “Retinal short-chain dehydrogenase/reductase retSDR2” encoded by a nucleic acid that hybridizes to the “Retinal short-chain dehydrogenase/reductase retSDR2” nucleic acid or its complement under low stringency conditions,

[0992] (xxxiv) “Stromal cell-derived factor 2-like 1” (SEQ ID No:100) or a functionally active derivative thereof, or a functionally active fragment thereof, or a homolog thereof, or a variant of “Stromal cell-derived factor 2-like 1” encoded by a nucleic acid that hybridizes to the “Stromal cell-derived factor 2-like 1” nucleic acid or its complement under low stringency conditions,

[0993] (xxxv) “Thioredoxin domain-containing protein” (SEQ ID No:101) or a functionally active derivative thereof, or a functionally active fragment thereof, or a homolog thereof, or a variant of “Thioredoxin domain-containing protein” encoded by a nucleic acid that hybridizes to the “Thioredoxin domain-containing protein” nucleic acid or its complement under low stringency conditions,

[0994] (xxxvi) “homolog of yeast golgi membrane protein yif1p (yip1p-interacting factor)” (SEQ ID No:113) or a functionally active derivative thereof, or a functionally active fragment thereof, or a homolog thereof, or a variant of “homolog of yeast golgi membrane protein yif1p (yip1p-interacting factor)” encoded by a nucleic acid that hybridizes to the “homolog of yeast golgi membrane protein yif1p (yip1p-interacting factor)” nucleic acid or its complement under low stringency conditions, and

[0995] (xxxvii) “tyrosine phosphatase ensg00000149185” (SEQ ID No:86) or a functionally active derivative thereof, or a functionally active fragment thereof, or a homolog thereof, or a variant of “tyrosine phosphatase ensg00000149185” encoded by a nucleic acid that hybridizes to the “tyrosine phosphatase ensg00000149185” nucleic acid or its complement under low stringency conditions, and a complex (II) comprising at least two of said second proteins, wherein said low stringency conditions comprise hybridization in a buffer comprising 35% formamide, 5×SSC, 50 mM Tris-HCI (pH 7.5), 5 mM EDTA, 0.02% PVP, 0.02% Ficoll, 0.2% BSA, 100 ug/ml denatured salmon sperm DNA, and 10% (wt/vol) dextran sulfate for 18-20 hours at 40 Celsius, washing in a buffer consisting of 2×SSC, 25 mM Tris-HCI (pH 7.4), 5 mM EDTA, and 0.1% SDS for 1.5 hours at 55 Celsius, and washing in a buffer consisting of 2×SSC, 25 mM Tris-HCI (pH 7.4), 5 mM EDTA, and 0.1% SDS for 1.5 hours at 60 Celsius.

[0996] 2. The protein complex according to No. 1 wherein the first protein is the protein ‘Nicastrin’ (SEQ ID NO. 147), or a functionally active derivative thereof, or a functionally active fragment thereof, or a homolog thereof, or a variant of ‘Nicastrin’ encoded by a nucleic acid that hybridizes to the ‘Nicastrin’ under low stringency conditions.

3. The protein complex according to No. 1 selected from complex (I) and comprising the following proteins:

[0997] (i) “18 kDa microsomal signal peptidase subunit” (SEQ ID No:53) or a functionally active derivative thereof, or a functionally active fragment thereof, or a homolog thereof, or a variant of “18 kDa microsomal signal peptidase subunit” encoded by a nucleic acid that hybridizes to the “18 kDa microsomal signal peptidase subunit” nucleic acid or its complement under low stringency conditions,

[0998] (ii) “25 kDa microsomal signal peptidase subunit” (SEQ ID No:119) or a functionally active derivative thereof, or a functionally active fragment thereof, or a homolog thereof, or a variant of “25 kDa microsomal signal peptidase subunit” encoded by a nucleic acid that hybridizes to the “25 kDa microsomal signal peptidase subunit” nucleic acid or its complement under low stringency conditions,

[0999] (iii) “ATP-binding cassette, sub-family A, member 3” (SEQ ID No:103) or a functionally active derivative thereof, or a functionally active fragment thereof, or a homolog thereof, or a variant of “ATP-binding cassette, sub-family A, member 3” encoded by a nucleic acid that hybridizes to the “ATP-binding cassette, subfamily A, member 3” nucleic acid or its complement under low stringency conditions,

[1000] (iv) “Aph-1a” (SEQ ID No:1) or a functionally active derivative thereof, or a functionally active fragment thereof; or a homolog thereof, or a variant of “Aph-1a” encoded by a nucleic acid that hybridizes to the “Aph-1a” nucleic acid or its complement under low stringency conditions,

[1001] (v) “BACE1” (SEQ ID No:38) or a functionally active derivative thereof, or a functionally active fragment thereof, or a homolog thereof, or a variant of “BACE1” encoded by a nucleic acid that hybridizes to the “BACE1” nucleic acid or its complement under low stringency conditions,

[1002] (vi) “BSCv protein (FRAGMENT)” (SEQ ID No:70) or a functionally active derivative thereof, or a functionally active fragment thereof, or a homolog thereof, or a variant of “BSCv protein (FRAGMENT)” encoded by a nucleic acid that hybridizes to the “BSCv protein (FRAGMENT)” nucleic acid or its complement under low stringency conditions,

[1003] (vii) “CAMK4” (SEQ ID No:104) or a functionally active derivative thereof, or a functionally active fragment thereof, or a homolog thereof, or a variant of “CAMK4” encoded by a nucleic acid that hybridizes to the “CAMK4” nucleic acid or its complement under low stringency conditions,

[1004] (viii) “CGI-13” (SEQ ID No:72) or a functionally active derivative thereof, or a functionally active fragment thereof, or a homolog thereof, or a variant of “CGI-13” encoded by a nucleic acid that hybridizes to the “CGI-13” nucleic acid or its complement under low stringency conditions,

[1005] (ix) “Casein kinase II beta chain” (SEQ ID No:74) or a functionally active derivative thereof, or a functionally active fragment thereof, or a homolog thereof, or a variant of “Casein kinase II beta chain” encoded by a nucleic acid that hybridizes to the “Casein kinase II beta chain” nucleic acid or its complement under low stringency conditions,

[1006] (x) “Cathepsin B” (SEQ ID No:75) or a functionally active derivative thereof, or a functionally active fragment thereof, or a homolog thereof, or a variant of “Cathepsin B” encoded by a nucleic acid that hybridizes to the “Cathepsin B” nucleic acid or its complement under low stringency conditions,

[1007] (xi) “DCTN1” (SEQ ID No:106) or a functionally active derivative thereof, or a functionally active fragment thereof, or a homolog thereof, or a variant of “DCTN1” encoded by a nucleic acid that hybridizes to the “DCTN1” nucleic acid or its complement under low stringency conditions,

[1008] (xii) “Delta-6 fatty acid desaturase” (SEQ ID No:76) or a functionally active derivative thereof, or a functionally active fragment thereof, or a homolog thereof, or a variant of “Delta-6 fatty acid desaturase” encoded by a nucleic acid that hybridizes to the “Delta-6 fatty acid desaturase” nucleic acid or its complement under low stringency conditions,

[1009] (xiii) “ENSG00000144840” (SEQ ID No:79) or a functionally active derivative thereof, or a functionally active fragment thereof, or a homolog thereof, or a variant of “ENSG00000144840” encoded by a nucleic acid that hybridizes to the “ENSG00000144840” nucleic acid or its complement under low stringency conditions,

[1010] (xiv) “FACL3” (SEQ ID No:108) or a functionally active derivative thereof, or a functionally active fragment thereof, or a homolog thereof, or a variant of “FACL3” encoded by a nucleic acid that hybridizes to the “FACL3” nucleic acid or its complement under low stringency conditions,

[1011] (xv) “FACL4” (SEQ ID No:109) or a functionally active derivative thereof, or a functionally active fragment thereof, or a homolog thereof, or a variant of “FACL4” encoded by a nucleic acid that hybridizes to the “FACL4A” nucleic acid or its complement under low stringency conditions,

[1012] (xvi) “FLJ13977” (SEQ ID No:81) or a functionally active derivative thereof, or a functionally active fragment thereof, or a homolog thereof, or a variant of “FLJ13977” encoded by a nucleic acid that hybridizes to the “FLJ13977” nucleic acid or its complement under low stringency conditions,

[1013] (xvii) “FLJ20342” (SEQ ID No:56) or a functionally active derivative thereof, or a functionally active fragment thereof, or a homolog thereof, or a variant of “FLJ20342” encoded by a nucleic acid that hybridizes to the “FLJ20342” nucleic acid or its complement under low stringency conditions,

[1014] (xviii) “FLJ20481” (SEQ ID No:82) or a functionally active derivative thereof, or a functionally active fragment thereof, or a homolog thereof, or a variant of “FLJ20481” encoded by a nucleic acid that hybridizes to the “FLJ20481” nucleic acid or its complement under low stringency conditions,

[1015] (xix) “FLJ22390” (SEQ ID No:84) or a functionally active derivative thereof, or a functionally active fragment thereof, or a homolog thereof, or a variant of “FLJ22390” encoded by a nucleic acid that hybridizes to the “FLJ22390” nucleic acid or its complement under low stringency conditions,

[1016] (xx) “ICAM-2” (SEQ ID No:87) or a functionally active derivative thereof, or a functionally active fragment thereof, or a homolog thereof, or a variant of “ICAM-2” encoded by a nucleic acid that hybridizes to the “ICAM-2” nucleic acid or its complement under low stringency conditions,

[1017] (xxi) “KIAA0095” (SEQ ID No:110) or a functionally active derivative thereof, or a functionally active fragment thereof, or a homolog thereof, or a variant of “KIAA0095” encoded by a nucleic acid that hybridizes to the “KIAA0095” nucleic acid or its complement under low stringency conditions,

[1018] (xxii) “KIAA0922” (SEQ ID No:111) or a functionally active derivative thereof, or a functionally active fragment thereof, or a homolog thereof, or a variant of “KIAA0922” encoded by a nucleic acid that hybridizes to the “KIAA0922” nucleic acid or its complement under low stringency conditions,

[1019] (xxiii) “KIAA1181 (FRAGMENT)” (SEQ ID No:88) or a functionally active derivative thereof, or a functionally active fragment thereof, or a homolog thereof, or a variant of “KIAA1181 (FRAGMENT)” encoded by a nucleic acid that hybridizes to the “KIAA1181 (FRAGMENT)” nucleic acid or its complement under low stringency conditions,

[1020] (xxiv) “KIAA1533 (FRAGMENT)” (SEQ ID No:89) or a functionally active derivative thereof, or a functionally active fragment thereof, or a homolog thereof, or a variant of “KIAA1533 (FRAGMENT)” encoded by a nucleic acid that hybridizes to the “KIAA1533 (FRAGMENT)” nucleic acid or its complement under low stringency conditions,

[1021] (xxv) “Mesenchymal stem cell protein DSCD75” (SEQ ID No:91) or a functionally active derivative thereof, or a functionally active fragment thereof, or a homolog thereof, or a variant of “Mesenchymal stem cell protein DSCD75” encoded by a nucleic acid that hybridizes to the “Mesenchymal stem cell protein DSCD75” nucleic acid or its complement under low stringency conditions,

[1022] (xxvi) “NICE-3” (SEQ ID No:58) or a functionally active derivative thereof, or a functionally active fragment thereof, or a homolog thereof, or a variant of “NICE-3” encoded by a nucleic acid that hybridizes to the “NICE-3” nucleic acid or its complement under low stringency conditions,

[1023] (xxvii) “Neurotrypsin” (SEQ ID No:92) or a functionally active derivative thereof, or a functionally active fragment thereof, or a homolog thereof, or a variant of “Neurotrypsin” encoded by a nucleic acid that hybridizes to the “Neurotrypsin” nucleic acid or its complement under low stringency conditions,

[1024] (xxviii) “Nicastrin” (SEQ ID No:9) or a functionally active derivative thereof, or a functionally active fragment thereof, or a homolog thereof, or a variant of “Nicastrin” encoded by a nucleic acid that hybridizes to the “Nicastrin” nucleic acid or its complement under low stringency conditions,

[1025] (xxix) “PAS domain containing serine/threonine kinase” (SEQ ID No:112) or a functionally active derivative thereof, or a functionally active fragment thereof, or a homolog thereof, or a variant of “PAS domain containing serine/threonine kinase” encoded by a nucleic acid that hybridizes to the “PAS domain containing serine/threonine kinase” nucleic acid or its complement under low stringency conditions,

[1026] (xxx) “PP1, regulatory subunit 15B” (SEQ ID No:93) or a functionally active derivative thereof, or a functionally active fragment thereof, or a homolog thereof, or a variant of “PP1, regulatory subunit 15B” encoded by a nucleic acid that hybridizes to the “PP1, regulatory subunit 15B” nucleic acid or its complement under low stringency conditions,

[1027] (xxxi) “Pen-2” (SEQ ID No:10) or a functionally active derivative thereof, or a functionally active fragment thereof, or a homolog thereof, or a variant of “Pen-2” encoded by a nucleic acid that hybridizes to the “Pen-2” nucleic acid or its complement under low stringency conditions,

[1028] (xxxii) “Presenilin-1” (SEQ ID No:14) or a functionally active derivative thereof, or a functionally active fragment thereof, or a homolog thereof, or a variant of “Presenilin-1” encoded by a nucleic acid that hybridizes to the “Presenilin-1” nucleic acid or its complement under low stringency conditions,

[1029] (xxxiii) “Presenilin-2” (SEQ ID No:66) or a functionally active derivative thereof, or a functionally active fragment thereof, or a homolog thereof, or a variant of “Presenilin-2” encoded by a nucleic acid that hybridizes to the “Presenilin-2” nucleic acid or its complement under low stringency conditions,

[1030] (xxxiv) “Protein amplified in osteosarcoma (OS-9)” (SEQ ID No:94) or a functionally active derivative thereof, or a functionally active fragment thereof, or a homolog thereof, or a variant of “Protein amplified in osteosarcoma (OS-9)” encoded by a nucleic acid that hybridizes to the “Protein amplified in osteosarcoma (OS-9)” nucleic acid or its complement under low stringency conditions,

[1031] (xxxv) “Protein similar to stromal cell-derived factor 2” (SEQ ID No:95) or a functionally active derivative thereof, or a functionally active fragment thereof, or a homolog thereof, or a variant of “Protein similar to stromal cell-derived factor 2” encoded by a nucleic acid that hybridizes to the “Protein similar to stromal cell-derived factor 2” nucleic acid or its complement under low stringency conditions,

[1032] (xxxvi) “Protocadherin beta 8” (SEQ ID No:96) or a functionally active derivative thereof, or a functionally active fragment thereof, or a homolog thereof, or a variant of “Protocadherin beta 8” encoded by a nucleic acid that hybridizes to the “Protocadherin beta 8” nucleic acid or its complement under low stringency conditions,

[1033] (xxxvii) “REP8 protein” (SEQ ID No:97) or a functionally active derivative thereof, or a functionally active fragment thereof, or a homolog thereof, or a variant of “REP8 protein” encoded by a nucleic acid that hybridizes to the “REP8 protein” nucleic acid or its complement under low stringency conditions,

[1034] (xxxviii) “RING finger protein 5” (SEQ ID No:98) or a functionally active derivative thereof, or a functionally active fragment thereof, or a homolog thereof, or a variant of “RING finger protein 5” encoded by a nucleic acid that hybridizes to the “RING finger protein 5” nucleic acid or its complement under low stringency conditions,

[1035] (xxxix) “Retinal short-chain dehydrogenase/reductase retSDR2” (SEQ ID No:99) or a functionally active derivative thereof, or a functionally active fragment thereof, or a homolog thereof, or a variant of “Retinal short-chain dehydrogenase/reductase retSDR2” encoded by a nucleic acid that hybridizes to the “Retinal short-chain dehydrogenase/reductase retSDR2” nucleic acid or its complement under low stringency conditions,

[1036] (xl) “Stromal cell-derived factor 2-like 1” (SEQ ID No:100) or a functionally active derivative thereof, or a functionally active fragment thereof, or a homolog thereof, or a variant of “Stromal cell-derived factor 2-like 1” encoded by a nucleic acid that hybridizes to the “Stromal cell-derived factor 2-like 1” nucleic acid or its complement under low stringency conditions,

[1037] (xli) “Thioredoxin domain-containing protein” (SEQ ED No:101) or a functionally active derivative thereof, or a functionally active fragment thereof, or a homolog thereof, or a variant of “Thioredoxin domain-containing protein” encoded by a nucleic acid that hybridizes to the “Thioredoxin domain-containing protein” nucleic acid or its complement under low stringency conditions,

[1038] (xlii) “homolog of yeast golgi membrane protein yif1p (yip1p-interacting factor)” (SEQ ID No:113) or a functionally active derivative thereof, or a functionally active fragment thereof, or a homolog thereof, or a variant of “homolog of yeast golgi membrane protein yif1p (yip1p-interacting factor)” encoded by a nucleic acid that hybridizes to the “homolog of yeast golgi membrane protein yif1p (yip1p-interacting factor)” nucleic acid or its complement under low stringency conditions, and/or

[1039] (xliii) “tyrosine phosphatase ensg00000149185” (SEQ ID No:86) or a functionally active derivative thereof, or a functionally active fragment thereof, or a homolog thereof, or a variant of “tyrosine phosphatase ensg00000149185” encoded by a nucleic acid that hybridizes to the “tyrosine phosphatase ensg00000149185” nucleic acid or its complement under low stringency conditions,

and a protein complex selected from complex (II) and comprising the following proteins:

[1040] (i) “18 kDa microsomal signal peptidase subunit” (SEQ ID No:53) or a functionally active derivative thereof, or a functionally active fragment thereof, or a homolog thereof, or a variant of “18 kDa microsomal signal peptidase subunit” encoded by a nucleic acid that hybridizes to the “18 kDa microsomal signal peptidase subunit” nucleic acid or its complement under low stringency conditions,

[1041] (ii) “25 kDa microsomal signal peptidase subunit” (SEQ ID No:119) or a functionally active derivative thereof, or a functionally active fragment thereof, or a homolog thereof, or a variant of “25 kDa microsomal signal peptidase subunit” encoded by a nucleic acid that hybridizes to the “25 kDa microsomal signal peptidase subunit” nucleic acid or its complement under low stringency conditions,

[1042] (iii) “ATP-binding cassette, sub-family A, member 3” (SEQ ID No:103) or a functionally active derivative thereof, or a functionally active fragment thereof, or a homolog thereof, or a variant of “ATP-binding cassette, sub-family A, member 3” encoded by a nucleic acid that hybridizes to the “ATP-binding cassette, sub-family A, member 3” nucleic acid or its complement under low stringency conditions,

[1043] (iv) “Aph-1a” (SEQ ID No:1) or a functionally active derivative thereof, or a functionally active fragment thereof, or a homolog thereof, or a variant of “Aph-1a” encoded by a nucleic acid that hybridizes to the “Aph-1a” nucleic acid or its complement under low stringency conditions,

[1044] (v) “BSCv protein (FRAGMENT)” (SEQ ID No:70) or a functionally active derivative thereof, or a functionally active fragment thereof, or a homolog thereof, or a variant of “BSCv protein (FRAGMENT)” encoded by a nucleic acid that hybridizes to the “BSCv protein (FRAGMENT)” nucleic acid or its complement under low stringency conditions,

[1045] (vi) “CAMK4” (SEQ ID No:104) or a functionally active derivative thereof, or a functionally active fragment thereof, or a homolog thereof, or a variant of “CAMK4” encoded by a nucleic acid that hybridizes to the “CAMK4” nucleic acid or its complement under low stringency conditions,

[1046] (vii) “CGI-13” (SEQ ID No:72) or a functionally active derivative thereof, or a functionally active fragment thereof, or a homolog thereof, or a variant of “CGI-13” encoded by a nucleic acid that hybridizes to the “CGI-13” nucleic acid or its complement under low stringency conditions,

[1047] (viii) “Casein kinase II beta chain” (SEQ ID No:74) or a functionally active derivative thereof, or a functionally active fragment thereof, or a homolog thereof, or a variant of “Casein kinase II beta chain” encoded by a nucleic acid that hybridizes to the “Casein kinase II beta chain” nucleic acid or its complement under low stringency conditions,

[1048] (ix) “Cathepsin B” (SEQ ID No:75) or a functionally active derivative thereof, or a functionally active fragment thereof, or a homolog thereof, or a variant of “Cathepsin B” encoded by a nucleic acid that hybridizes to the “Cathepsin B” nucleic acid or its complement under low stringency conditions,

[1049] (x) “DCTN1” (SEQ ID No:106) or a functionally active derivative thereof, or a functionally active fragment thereof, or a homolog thereof, or a variant of “DCTN1” encoded by a nucleic acid that hybridizes to the “DCTN1” nucleic acid or its complement under low stringency conditions,

[1050] (xi) “Delta-6 fatty acid desaturase” (SEQ ID No:76) or a functionally active derivative thereof, or a functionally active fragment thereof, or a homolog thereof, or a variant of “Delta-6 fatty acid desaturase” encoded by a nucleic acid that hybridizes to the “Delta-6 fatty acid desaturase” nucleic acid or its complement under low stringency conditions,

[1051] (xii) “ENSG00000144840” (SEQ ID No:79) or a functionally active derivative thereof, or a functionally active fragment thereof, or a homolog thereof, or a variant of “ENSG00000144840” encoded by a nucleic acid that hybridizes to the “ENSG00000144840” nucleic acid or its complement under low stringency conditions,

[1052] (xiii) “FACL3” (SEQ ID No:108) or a functionally active derivative thereof, or a functionally active fragment thereof, or a homolog thereof, or a variant of “FACL3” encoded by a nucleic acid that hybridizes to the “FACL3” nucleic acid or its complement under low stringency conditions,

[1053] (xiv) “FACL4” (SEQ ID No:109) or a functionally active derivative thereof, or a functionally active fragment thereof, or a homolog thereof, or a variant of “FACL6” encoded by a nucleic acid that hybridizes to the “FACL4” nucleic acid or its complement under low stringency conditions,

[1054] (xv) “FLJ13977” (SEQ ID No:81) or a functionally active derivative thereof, or a functionally active fragment thereof, or a homolog thereof, or a variant of “FLJ13977” encoded by a nucleic acid that hybridizes to the “FLJ13977” nucleic acid or its complement under low stringency conditions,

[1055] (xvi) “FLJ20342” (SEQ ID No:56) or a functionally active derivative thereof, or a functionally active fragment thereof, or a homolog thereof, or a variant of “FLJ20342” encoded by a nucleic acid that hybridizes to the “FLJ20342” nucleic acid or its complement under low stringency conditions,

[1056] (xvii) “FLJ20481” (SEQ ID No:82) or a functionally active derivative thereof, or a functionally active fragment thereof, or a homolog thereof, or a variant of “FLJ20481” encoded by a nucleic acid that hybridizes to the “FLJ20481” nucleic acid or its complement under low stringency conditions,

[1057] (xviii) “FLJ22390” (SEQ ID No:84) or a functionally active derivative thereof, or a functionally active fragment thereof, or a homolog thereof, or a variant of “FLJ22390” encoded by a nucleic acid that hybridizes to the “FLJ22390” nucleic acid or its complement under low stringency conditions,

[1058] (xix) “ICAM-2” (SEQ ID No:87) or a functionally active derivative thereof, or a functionally active fragment thereof, or a homolog thereof, or a variant of “ICAM-2” encoded by a nucleic acid that hybridizes to the “ICAM-2” nucleic acid or its complement under low stringency conditions,

[1059] (xx) “KIAA0095” (SEQ ID No:110) or a functionally active derivative thereof, or a functionally active fragment thereof, or a homolog thereof, or a variant of “KIAA0095” encoded by a nucleic acid that hybridizes to the “KIAA0095” nucleic acid or its complement under low stringency conditions,

[1060] (xxi) “KIAA0922” (SEQ ID No:111) or a functionally active derivative thereof, or a functionally active fragment thereof, or a homolog thereof, or a variant of “KIAA0922” encoded by a nucleic acid that hybridizes to the “KIAA0922” nucleic acid or its complement under low stringency conditions,

[1061] (xxii) “KIAA1181 (FRAGMENT)” (SEQ ID No:88) or a functionally active derivative thereof, or a functionally active fragment thereof, or a homolog thereof, or a variant of “KIAA1181 (FRAGMENT)” encoded by a nucleic acid that hybridizes to the “KIAA1181 (FRAGMENT)” nucleic acid or its complement under low stringency conditions,

[1062] (xxiii) “KIAA1533 (FRAGMENT)” (SEQ ID No:89) or a functionally active derivative thereof, or a functionally active fragment thereof, or a homolog thereof, or a variant of “KIAA1533 (FRAGMENT)” encoded by a nucleic acid that hybridizes to the “KIAA1533 (FRAGMENT)” nucleic acid or its complement under low stringency conditions,

[1063] (xxiv) “Mesenchymal stem cell protein DSCD75” (SEQ ID No:91) or a functionally active derivative thereof, or a functionally active fragment thereof, or a homolog thereof, or a variant of “Mesenchymal stem cell protein DSCD75” encoded by a nucleic acid that hybridizes to the “Mesenchymal stem cell protein DSCD75” nucleic acid or its complement under low stringency conditions,

[1064] (xxv) “NICE-3” (SEQ ID No:58) or a functionally active derivative thereof, or a functionally active fragment thereof, or a homolog thereof, or a variant of “NICE-3” encoded by a nucleic acid that hybridizes to the “NICE-3” nucleic acid or its complement under low stringency conditions,

[1065] (xxvi) “Neurotrypsin” (SEQ ID No:92) or a functionally active derivative thereof, or a functionally active fragment thereof, or a homolog thereof, or a variant of “Neurotrypsin” encoded by a nucleic acid that hybridizes to the “Neurotrypsin” nucleic acid or its complement under low stringency conditions,

[1066] (xxvii) “Nicastrin” (SEQ ID No:9) or a functionally active derivative thereof, or a functionally active fragment thereof, or a homolog thereof, or a variant of “Nicastrin” encoded by a nucleic acid that hybridizes to the “Nicastrin” nucleic acid or its complement under low stringency conditions,

[1067] (xxviii) “PAS domain containing serine/threonine kinase” (SEQ ID No:112) or a functionally active derivative thereof, or a functionally active fragment thereof, or a homolog thereof, or a variant of “PAS domain containing serine/threonine kinase” encoded by a nucleic acid that hybridizes to the “PAS domain containing serine/threonine kinase” nucleic acid or its complement under low stringency conditions,

[1068] (xxix) “PP1, regulatory subunit 15B” (SEQ ID No:93) or a functionally active derivative thereof, or a functionally active fragment thereof, or a homolog thereof, or a variant of “PP1, regulatory subunit 15B” encoded by a nucleic acid that hybridizes to the “PP1, regulatory subunit 15B” nucleic acid or its complement under low stringency conditions,

[1069] (xxx) “Presenilin-1” (SEQ ID No:14) or a functionally active derivative thereof, or a functionally active fragment thereof, or a homolog thereof, or a variant of “Presenilin-1” encoded by a nucleic acid that hybridizes to the “Presenilin-1” nucleic acid or its complement under low stringency conditions,

[1070] (xxxi) “Presenilin-2” (SEQ ID No:66) or a functionally active derivative thereof, or a functionally active fragment thereof, or a homolog thereof, or a variant of “Presenilin-2” encoded by a nucleic acid that hybridizes to the “Presenilin-2” nucleic acid or its complement under low stringency conditions,

[1071] (xxxii) “Protein amplified in osteosarcoma (OS-9)” (SEQ ID No:94) or a functionally active derivative thereof, or a functionally active fragment thereof, or a homolog thereof, or a variant of “Protein amplified in osteosarcoma (OS-9)” encoded by a nucleic acid that hybridizes to the “Protein amplified in osteosarcoma (OS-9)” nucleic acid or its complement under low stringency conditions,

[1072] (xxxiii) “Protein similar to stromal cell-derived factor 2” (SEQ ID No:95) or a functionally active derivative thereof, or a functionally active fragment thereof, or a homolog thereof, or a variant of “Protein similar to stromal cell-derived factor 2” encoded by a nucleic acid that hybridizes to the “Protein similar to stromal cell-derived factor 2” nucleic acid or its complement under low stringency conditions,

[1073] (xxxiv) “Protocadherin beta 8” (SEQ ID No:96) or a functionally active derivative thereof, or a functionally active fragment thereof, or a homolog thereof, or a variant of “Protocadherin beta 8” encoded by a nucleic acid that hybridizes to the “Protocadherin beta 8” nucleic acid or its complement under low stringency conditions,

[1074] (xxxv) “REP8 protein” (SEQ ID No:97) or a functionally active derivative thereof, or a functionally active fragment thereof, or a homolog thereof, or a variant of “REP8 protein” encoded by a nucleic acid that hybridizes to the “REP8 protein” nucleic acid or its complement under low stringency conditions,

[1075] (xxxvi) “RING finger protein 5” (SEQ ID No:98) or a functionally active derivative thereof, or a functionally active fragment thereof, or a homolog thereof, or a variant of “RING finger protein 5” encoded by a nucleic acid that hybridizes to the “RING finger protein 5” nucleic acid or its complement under low stringency conditions,

[1076] (xxxvii) “Retinal short-chain dehydrogenase/reductase retSDR2” (SEQ ID No:99) or a functionally active derivative thereof, or a functionally active fragment thereof, or a homolog thereof, or a variant of “Retinal short-chain dehydrogenase/reductase retSDR2” encoded by a nucleic acid that hybridizes to the “Retinal short-chain dehydrogenase/reductase retSDR2” nucleic acid or its complement under low stringency conditions,

[1077] (xxxviii) “Stromal cell-derived factor 2-like 1” (SEQ ID No:100) or a functionally active derivative thereof, or a functionally active fragment thereof, or a homolog thereof, or a variant of “Stromal cell-derived factor 2-like 1” encoded by a nucleic acid that hybridizes to the “Stromal cell-derived factor 2-like 1” nucleic acid or its complement under low stringency conditions,

[1078] (xxxix) “Thioredoxin domain-containing protein” (SEQ ID No:101) or a functionally active derivative thereof, or a functionally active fragment thereof, or a homolog thereof, or a variant of “Thioredoxin domain-containing protein” encoded by a nucleic acid that hybridizes to the “Thioredoxin domain-containing protein” nucleic acid or its complement under low stringency conditions,

[1079] (xl) “homolog of yeast golgi membrane protein yif1p (yip1p-interacting factor)” (SEQ ID No:113) or a functionally active derivative thereof, or a functionally active fragment thereof, or a homolog thereof, or a variant of “homolog of yeast golgi membrane protein yif1p (yip1p-interacting factor)” encoded by a nucleic acid that hybridizes to the “homolog of yeast golgi membrane protein yif1p (yip1p-interacting factor)” nucleic acid or its complement under low stringency conditions, and/or

[1080] (xli) “tyrosine phosphatase ensg00000149185” (SEQ ID No:86) or a functionally active derivative thereof, or a functionally active fragment thereof, or a homolog thereof, or a variant of “tyrosine phosphatase ensg00000149185” encoded by a nucleic acid that hybridizes to the “tyrosine phosphatase ensg00000149185” nucleic acid or its complement under low stringency conditions.

4. The protein complex according to No. 1 comprising all but 1-36 of the following proteins:

[1081] (i) “18 kDa microsomal signal peptidase subunit” (SEQ ID No:53) or a functionally active derivative thereof, or a functionally active fragment thereof, or a homolog thereof, or a variant of “18 kDa microsomal signal peptidase subunit” encoded by a nucleic acid that hybridizes to the “18 kDa microsomal signal peptidase subunit” nucleic acid or its complement under low stringency conditions,

[1082] (ii) “25 kDa microsomal signal peptidase subunit” (SEQ ID No:119) or a functionally active derivative thereof, or a functionally active fragment thereof, or a homolog thereof, or a variant of “25 kDa microsomal signal peptidase subunit” encoded by a nucleic acid that hybridizes to the “25 kDa microsomal signal peptidase subunit” nucleic acid or its complement under low stringency conditions,

[1083] (iii) “ATP-binding cassette, sub-family A, member 3” (SEQ ID No:103) or a functionally active derivative thereof, or a functionally active fragment thereof, or a homolog thereof, or a variant of “ATP-binding cassette, sub-family A, member 3” encoded by a nucleic acid that hybridizes to the “ATP-binding cassette, sub-family A, member 3” nucleic acid or its complement under low stringency conditions,

[1084] (iv) “Aph-1a” (SEQ ID No:1) or a functionally active derivative thereof, or a functionally active fragment thereof, or a homolog thereof, or a variant of “Aph-1a” encoded by a nucleic acid that hybridizes to the “Aph-1a” nucleic acid or its complement under low stringency conditions,

[1085] (v) “BACE1” (SEQ ID No:38) or a functionally active derivative thereof, or a functionally active fragment thereof, or a homolog thereof, or a variant of “BACE1” encoded by a nucleic acid that hybridizes to the “BACE1” nucleic acid or its complement under low stringency conditions,

[1086] (vi) “BSCv protein (FRAGMENT)” (SEQ ID No:70) or a functionally active derivative thereof, or a functionally active fragment thereof, or a homolog thereof, or a variant of “BSCv protein (FRAGMENT)” encoded by a nucleic acid that hybridizes to the “BSCv protein (FRAGMENT)” nucleic acid or its complement under low stringency conditions,

[1087] (vii) “CAMK4” (SEQ ID No:104) or a functionally active derivative thereof, or a functionally active fragment thereof, or a homolog thereof, or a variant of “CAMK4” encoded by a nucleic acid that hybridizes to the “CAMK4” nucleic acid or its complement under low stringency conditions,

[1088] (viii) “CGI-13” (SEQ ID No:72) or a functionally active derivative thereof, or a functionally active fragment thereof, or a homolog thereof, or a variant of “CGI-13” encoded by a nucleic acid that hybridizes to the “CGI-13” nucleic acid or its complement under low stringency conditions,

[1089] (ix) “Casein kinase II beta chain” (SEQ ID No:74) or a functionally active derivative thereof, or a functionally active fragment thereof, or a homolog thereof, or a variant of “Casein kinase II beta chain” encoded by a nucleic acid that hybridizes to the “Casein kinase II beta chain” nucleic acid or its complement under low stringency conditions,

[1090] (x) “Cathepsin B” (SEQ ID No:75) or a functionally active derivative thereof, or a functionally active fragment thereof, or a homolog thereof, or a variant of “Cathepsin B” encoded by a nucleic acid that hybridizes to the “Cathepsin B” nucleic acid or its complement under low stringency conditions,

[1091] (xi) “DCTN1” (SEQ ID No:106) or a functionally active derivative thereof, or a functionally active fragment thereof, or a homolog thereof, or a variant of “DCTN1” encoded by a nucleic acid that hybridizes to the “DCTN1” nucleic acid or its complement under low stringency conditions,

[1092] (xii) “Delta-6 fatty acid desaturase” (SEQ ID No:76) or a functionally active derivative thereof, or a functionally active fragment thereof, or a homolog thereof, or a variant of “Delta-6 fatty acid desaturase” encoded by a nucleic acid that hybridizes to the “Delta-6 fatty acid desaturase” nucleic acid or its complement under low stringency conditions,

[1093] (xiii) “ENSG00000144840” (SEQ ID No:79) or a functionally active derivative thereof, or a functionally active fragment thereof, or a homolog thereof, or a variant of “ENSG00000144840” encoded by a nucleic acid that hybridizes to the “ENSG00000144840” nucleic acid or its complement under low stringency conditions,

[1094] (xiv) “FACL3” (SEQ ID No:108) or a functionally active derivative thereof, or a functionally active fragment thereof, or a homolog thereof, or a variant of “FACL3” encoded by a nucleic acid that hybridizes to the “FACL3” nucleic acid or its complement under low stringency conditions,

[1095] (xv) “FACL4” (SEQ ID No:109) or a functionally active derivative thereof, or a functionally active fragment thereof, or a homolog thereof, or a variant of “FACL4” encoded by a nucleic acid that hybridizes to the “FACL4” nucleic acid or its complement under low stringency conditions,

[1096] (xvi) “FLJ13977” (SEQ ID No:81) or a functionally active derivative thereof, or a functionally active fragment thereof, or a homolog thereof, or a variant of “FLJ13977” encoded by a nucleic acid that hybridizes to the “FLJ13977” nucleic acid or its complement under low stringency conditions,

[1097] (xvii) “FLJ20342” (SEQ ID No:56) or a functionally active derivative thereof, or a functionally active fragment thereof, or a homolog thereof, or a variant of “FLJ20342” encoded by a nucleic acid that hybridizes to the “FLJ20342” nucleic acid or its complement under low stringency conditions,

[1098] (xviii) “FLJ20481” (SEQ ID No:82) or a functionally active derivative thereof, or a functionally active fragment thereof, or a homolog thereof, or a variant of “FLJ20481” encoded by a nucleic acid that hybridizes to the “FLJ20481” nucleic acid or its complement under low stringency conditions,

[1099] (xix) “FLJ22390” (SEQ ID No:84) or a functionally active derivative thereof, or a functionally active fragment thereof, or a homolog thereof, or a variant of “FLJ22390” encoded by a nucleic acid that hybridizes to the “FLJ22390” nucleic acid or its complement under low stringency conditions,

[1100] (xx) “ICAM-2” (SEQ ID No:87) or a functionally active derivative thereof, or a functionally active fragment thereof, or a homolog thereof, or a variant of “ICAM-2” encoded by a nucleic acid that hybridizes to the “ICAM-2” nucleic acid or its complement under low stringency conditions,

[1101] (xxi) “KIAA0095” (SEQ ID No:110) or a functionally active derivative thereof, or a functionally active fragment thereof, or a homolog thereof, or a variant of “KIAA0095” encoded by a nucleic acid that hybridizes to the “KIAA0095” nucleic acid or its complement under low stringency conditions,

[1102] (xxii) “KIAA0922” (SEQ ID No:111) or a functionally active derivative thereof, or a functionally active fragment thereof, or a homolog thereof, or a variant of “KIAA0922” encoded by a nucleic acid that hybridizes to the “KIAA0922” nucleic acid or its complement under low stringency conditions,

[1103] (xxiii) “KIAA1181 (FRAGMENT)” (SEQ ID No:88) or a functionally active derivative thereof, or a functionally active fragment thereof, or a homolog thereof, or a variant of “KIAA1181 (FRAGMENT)” encoded by a nucleic acid that hybridizes to the “KIAA1181 (FRAGMENT)” nucleic acid or its complement under low stringency conditions,

[1104] (xxiv) “KIAA1533 (FRAGMENT)” (SEQ ID No:89) or a functionally active derivative thereof, or a functionally active fragment thereof, or a homolog thereof, or a variant of “KIAA1533 (FRAGMENT)” encoded by a nucleic acid that hybridizes to the “KIAA1533 (FRAGMENT)” nucleic acid or its complement under low stringency conditions,

[1105] (xxv) “Mesenchymal stem cell protein DSCD75” (SEQ ID No:91) or a functionally active derivative thereof, or a functionally active fragment thereof, or a homolog thereof, or a variant of “Mesenchymal stem cell protein DSCD75” encoded by a nucleic acid that hybridizes to the “Mesenchymal stem cell protein DSCD75” nucleic acid or its complement under low stringency conditions,

[1106] (xxvi) “NICE-3” (SEQ ID No:58) or a functionally active derivative thereof, or a functionally active fragment thereof, or a homolog thereof, or a variant of “NICE-3” encoded by a nucleic acid that hybridizes to the “NICE-3” nucleic acid or its complement under low stringency conditions,

[1107] (xxvii) “Neurotrypsin” (SEQ ID No:92) or a functionally active derivative thereof, or a functionally active fragment thereof, or a homolog thereof, or a variant of “Neurotrypsin” encoded by a nucleic acid that hybridizes to the “Neurotrypsin” nucleic acid or its complement under low stringency conditions,

[1108] (xxviii) “Nicastrin” (SEQ ID No:9) or a functionally active derivative thereof, or a functionally active fragment thereof, or a homolog thereof, or a variant of “Nicastrin” encoded by a nucleic acid that hybridizes to the “Nicastrin” nucleic acid or its complement under low stringency conditions,

[1109] (xxix) “PAS domain containing serine/threonine kinase” (SEQ ID No:112) or a functionally active derivative thereof, or a functionally active fragment thereof, or a homolog thereof, or a variant of “PAS domain containing serine/threonine kinase” encoded by a nucleic acid that hybridizes to the “PAS domain containing serine/threonine kinase” nucleic acid or its complement under low stringency conditions,

[1110] (xxx) “PP1, regulatory subunit 15B” (SEQ ID No:93) or a functionally active derivative thereof, or a functionally active fragment thereof, or a homolog thereof, or a variant of “PP1, regulatory subunit 15B” encoded by a nucleic acid that hybridizes to the “PP1, regulatory subunit 15B” nucleic acid or its complement under low stringency conditions,

[1111] (xxxi) “Pen-2” (SEQ ID No:10) or a functionally active derivative thereof, or a functionally active fragment thereof, or a homolog thereof, or a variant of “Pen-2” encoded by a nucleic acid that hybridizes to the “Pen-2” nucleic acid or its complement under low stringency conditions,

[1112] (xxxii) “Presenilin-1” (SEQ ID No:14) or a functionally active derivative thereof, or a functionally active fragment thereof, or a homolog thereof, or a variant of “Presenilin-1” encoded by a nucleic acid that hybridizes to the “Presenilin-1” nucleic acid or its complement under low stringency conditions,

[1113] (xxxiii) “Presenilin-2” (SEQ ID No:66) or a functionally active derivative thereof, or a functionally active fragment thereof, or a homolog thereof, or a variant of “Presenilin-2” encoded by a nucleic acid that hybridizes to the “Presenilin-2” nucleic acid or its complement under low stringency conditions,

[1114] (xxxiv) “Protein amplified in osteosarcoma (OS-9)” (SEQ ID No:94) or a functionally active derivative thereof, or a functionally active fragment thereof, or a homolog thereof, or a variant of “Protein amplified in osteosarcoma (OS-9)” encoded by a nucleic acid that hybridizes to the “Protein amplified in osteosarcoma (OS-9)” nucleic acid or its complement under low stringency conditions,

[1115] (xxxv) “Protein similar to stromal cell-derived factor 2” (SEQ D No:95) or a functionally active derivative thereof, or a functionally active fragment thereof, or a homolog thereof, or a variant of “Protein similar to stromal cell-derived factor 2” encoded by a nucleic acid that hybridizes to the “Protein similar to stromal cell-derived factor 2” nucleic acid or its complement under low stringency conditions,

[1116] (xxxvi) “Protocadherin beta 8” (SEQ ID No:96) or a functionally active derivative thereof, or a functionally active fragment thereof, or a homolog thereof, or a variant of “Protocadherin beta 8” encoded by a nucleic acid that hybridizes to the “Protocadherin beta 8” nucleic acid or its complement under low stringency conditions,

[1117] (xxxvii) “REP8 protein” (SEQ ID No:97) or a functionally active derivative thereof, or a functionally active fragment thereof, or a homolog thereof, or a variant of “REP8 protein” encoded by a nucleic acid that hybridizes to the “REP8 protein” nucleic acid or its complement under low stringency conditions,

[1118] (xxxviii) “RING finger protein 5” (SEQ ID No:98) or a functionally active derivative thereof, or a functionally active fragment thereof, or a homolog thereof, or a variant of “RING finger protein 5” encoded by a nucleic acid that hybridizes to the “RING finger protein 5” nucleic acid or its complement under low stringency conditions,

[1119] (xxxix) “Retinal short-chain dehydrogenase/reductase retSDR2” (SEQ ID No:99) or a functionally active derivative thereof, or a functionally active fragment thereof, or a homolog thereof, or a variant of “Retinal short-chain dehydrogenase/reductase retSDR2” encoded by a nucleic acid that hybridizes to the “Retinal short-chain dehydrogenase/reductase retSDR2” nucleic acid or its complement under low stringency conditions,

[1120] (xl) “Stromal cell-derived factor 2-like 1” (SEQ ID No:100) or a functionally active derivative thereof, or a functionally active fragment thereof, or a homolog thereof, or a variant of “Stromal cell-derived factor 2-like 1” encoded by a nucleic acid that hybridizes to the “Stromal cell-derived factor 2-like 1” nucleic acid or its complement under low stringency conditions,

[1121] (xli) “Thioredoxin domain-containing protein” (SEQ ID No:101) or a functionally active derivative thereof, or a functionally active fragment thereof, or a homolog thereof, or a variant of “Thioredoxin domain-containing protein” encoded by a nucleic acid that hybridizes to the “Thioredoxin domain-containing protein” nucleic acid or its complement under low stringency conditions,

[1122] (xlii) “homolog of yeast golgi membrane protein yif1p (yip1p-interacting factor)” (SEQ ID No:113) or a functionally active derivative thereof, or a functionally active fragment thereof, or a homolog thereof, or a variant of “homolog of yeast golgi membrane protein yif1p (yip1p-interacting factor)” encoded by a nucleic acid that hybridizes to the “homolog of yeast golgi membrane protein yif1p (yip1p-interacting factor)” nucleic acid or its complement under low stringency conditions,

[1123] (xliii) “tyrosine phosphatase ensg00000149185” (SEQ ID No:86) or a functionally active derivative thereof, or a functionally active fragment thereof, or a homolog thereof, or a variant of “tyrosine phosphatase ensg00000149185” encoded by a nucleic acid that hybridizes to the “tyrosine phosphatase ensg00000149185” nucleic acid or its complement under low stringency conditions.

[1124] 5. The complex of any of No. 1-4 comprising a functionally active derivative of said first protein and/or a functionally active derivative of said second protein, wherein the functionally active derivative is a fusion protein comprising said first protein or said second protein fused to an amino acid sequence different from the first protein or second protein, respectively.

6. The complex of No. 5 wherein the functionally active derivative is a fusion protein comprising said first protein or said second protein fused to an affinity tag or label.

7. The complex of any of No. 1-4 comprising a fragment of said first protein and/or a fragment of said second protein, which fragment binds to another protein component of said complex.

[1125] 8. The complex of any of No. 1-7 that is involved in the the production of Abeta-40 and Abeta-42 peptides by ELISA (e.g. by modifying the expression of one or several interacting proteins in cells by means of RNAi (siRNA) and/or plasmids encoding the interacting protein(s)), the production of C-terminal APP fragments in cell lines or transgenic animals by western blot (e.g. by modifying the expression of one or several interacting proteins in cells by means of RNAi (siRNA) and/or plasmids encoding the interacting protein(s)), the proteolytic activity of beta- or gamma secretases towards bacterially expressed APP fragments in vitro (e.g. by modifying the expression of one or several interacting proteins in cells by means of RNAi (siRNA) and/or plasmids encoding the interacting protein(s)) or transactivation of a Gal4-driven reporter gene (e.g. by modifying the expression of one or several interacting proteins in cells by means of RNAi (siRNA) and/or plasmids encoding the interacting protein(s)).

[1126] 9. A process for preparing a complex of any of No. 1-8 and optionally the components thereof comprising the following steps: expressing a protein (bait) of the complex, preferably a tagged protein, in a target cell, isolating the protein complex which is attached to the bait protein, and optionally dissociating the protein complex and isolating the individual complex members.

10. The process according to No. 9 wherein the tagged protein comprises two different tags which allow two separate affinity purification steps.

11. The process according to any of No. 9-10 wherein the two tags are separated by a cleavage site for a protease.

12. Component of the Nicastrin complex obtainable by a process according to any of No. 9-11.

13. Protein of the Nicastrin complex selected from

[1127] (i) “ATP-binding cassette, sub-family A, member 3” (SEQ ID No:103) or a functionally active derivative thereof, or a functionally active fragment thereof, or a homolog thereof, or a variant of “ATP-binding cassette, sub-family A, member 3” encoded by a nucleic acid that hybridizes to the “ATP-binding cassette, sub-family A, member 3” nucleic acid or its complement under low-stringency conditions,

[1128] (ii) “CGI-13” (SEQ ID No:72) or a functionally active derivative thereof, or a functionally active fragment thereof, or a homolog thereof, or a variant of “CGI-13” encoded by a nucleic acid that hybridizes to the “CGI-13” nucleic acid or its complement under low stringency conditions,

[1129] (iii) “ENSG00000144840” (SEQ ID No:79) or a functionally active derivative thereof, or a functionally active fragment thereof, or a homolog thereof, or a variant of “ENSG00000144840” encoded by a nucleic acid that hybridizes to the “ENSG00000144840” nucleic acid or its complement under low stringency conditions,

[1130] (iv) “FLJ20342” (SEQ ID No:56) or a functionally active derivative thereof, or a functionally active fragment thereof, or a homolog thereof, or a variant of “FLJ20342” encoded by a nucleic acid that hybridizes to the “FLJ20342” nucleic acid or its complement under low stringency conditions,

[1131] (v) “FLJ20481” (SEQ ID No:82) or a functionally active derivative thereof, or a functionally active fragment thereof, or a homolog thereof, or a variant of “FLJ20481” encoded by a nucleic acid that hybridizes to the “FLJ20481” nucleic acid or its complement under low stringency conditions,

[1132] (vi) “FLJ22390” (SEQ ID No:84) or a functionally active derivative thereof, or a functionally active fragment thereof, or a homolog thereof, or a variant of “FLJ22390” encoded by a nucleic acid that hybridizes to the “FLJ22390” nucleic acid or its complement under low stringency conditions,

[1133] (vii) “KIAA0095” (SEQ ID No:110) or a functionally active derivative thereof, or a functionally active fragment thereof, or a homolog thereof, or a variant of “KIAA0095” encoded by a nucleic acid that hybridizes to the “KIAA0095” nucleic acid or its complement under low stringency conditions,

[1134] (viii) “KIAA0922” (SEQ ID No:111) or a functionally active derivative thereof, or a functionally active fragment thereof, or a homolog thereof, or a variant of “KIAA0922” encoded by a nucleic acid that hybridizes to the “KIAA0922” nucleic acid or its complement under low stringency conditions,

[1135] (ix) “KIAA1181 (FRAGMENT)” (SEQ ID No:88) or a functionally active derivative thereof, or a functionally active fragment thereof, or a homolog thereof, or a variant of “KIAA1181 (FRAGMENT)” encoded by a nucleic acid that hybridizes to the “KIAA1181 (FRAGMENT)” nucleic acid or its complement under low stringency conditions,

[1136] (x) “KIAA1533 (FRAGMENT)” (SEQ ID No:89) or a functionally active derivative thereof, or a functionally active fragment thereof, or a homolog thereof, or a variant of “KIAA1533 (FRAGMENT)” encoded by a nucleic acid that hybridizes to the “KIAA1533 (FRAGMENT)” nucleic acid or its complement under low stringency conditions,

[1137] (xi) “PP1, regulatory subunit 15B” (SEQ ID No:93) or a functionally active derivative thereof, or a functionally active fragment thereof, or a homolog thereof, or a variant of “PP1, regulatory subunit 15B” encoded by a nucleic acid that hybridizes to the “PP1, regulatory subunit 15B” nucleic acid or its complement under low stringency conditions,

[1138] (xii) “RING finger protein 5” (SEQ ID No:98) or a functionally active derivative thereof, or a functionally active fragment thereof, or a homolog thereof, or a variant of “RING finger protein 5” encoded by a nucleic acid that hybridizes to the “RING finger protein 5” nucleic acid or its complement under low stringency conditions,

[1139] (xiii) “Thioredoxin domain-containing protein” (SEQ ID No:101) or a functionally active derivative thereof, or a functionally active fragment thereof, or a homolog thereof, or a variant of “Thioredoxin domain-containing protein” encoded by a nucleic acid that hybridizes to the “Thioredoxin domain-containing protein” nucleic acid or its complement under low stringency conditions, and

[1140] (xiv) “tyrosine phosphatase ensg00000149185” (SEQ ID No:86) or a functionally active derivative thereof, or a functionally active fragment thereof, or a homolog thereof, or a variant of “tyrosine phosphatase ensg00000149185” encoded by a nucleic acid that hybridizes to the “tyrosine phosphatase ensg00000149185” nucleic acid or its complement under low stringency conditions, wherein said low stringency conditions comprise hybridization in a buffer comprising 35% formamide, 5×SSC, 50 mM Tris-HCI (pH 7.5), 5 mM EDTA, 0.02% PVP, 0.02% Ficoll, 0.2% BSA, 100 ug/ml denatured salmon sperm DNA, and 10% (wt/vol) dextran sulfate for 18-20 hours at 40 Celsius, washing in a buffer consisting of 2×SSC, 25 mM Tris-HCI (pH 7.4), 5 mM EDTA, and 0.1% SDS for 1.5 hours at 55 Celsius, and washing in a buffer consisting of 2×SSC, 25 mM Tris-HCI (pH 7.4), 5 mM EDTA, and 0.1% SDS for 1.5 hours at 60 Celsius.

14. Nucleic acid encoding a protein according to No. 13.

15. Construct, preferably a vector construct, comprising (a) a nucleic acid according to No. 14 and at least one further nucleic acid which is normally not associated with said nucleic acid, or

[1141] (b) at least two separate nucleic acid sequences each encoding a different protein, or a functionally active fragment or a functionally active derivative of at least one of said proteins, or functionally active fragments or functionally active derivative thereof being selected from the first group of proteins according to No. 1 (a) and at least one of said proteins, or functionally active fragments or functionally active derivative thereof being selected from the second group of proteins according to No. 1 (b).

[1142] 16. Host cell, containing a vector comprising at least one of the nucleic acid of No. 14 and/or a construct of No. 15 or containing several vectors each comprising at least the nucleic acid sequence encoding at least one of the proteins, or functionally active fragments or functionally active derivatives thereof selected from the first group of proteins according to No. 1 (a) and the proteins, or functionally active fragments or functionally active derivatives thereof selected from the second group of proteins according to No. 1 (b).

[1143] 17. An antibody or a fragment of said antibody containing the binding domain thereof, selected from an antibody or fragment thereof, which binds the complex of any of No. 1-8 and which does not bind any of the proteins of said complex when uncomplexed and an antibody or a fragment of said antibody which binds to any of the proteins according to No. 13.

18. A kit comprising in one or more container the complex of any of No. 1-8 and/or the proteins of No. 13 optionally together with an antibody according to No. 17 and/or further components such as reagents and working instructions.

19. The kit according to No. 18 for processing a substrate of said complex.

20. The kit according to No. 18 for the diagnosis or prognosis of a disease or a disease risk, preferentially for a disease or disorder such as neurodegenerative diseases such as Alzheimer's disease and related neurodegenerative disorders.

21. Array, in which at least a complex according to any of No. 1-8 and/or at least one protein according to No. 14 and/or at least one antibody according to No. 17 is attached to a solid carrier.

22. A process for processing a physiological substrate of the complex comprising the step of bringing into contact a complex to any of No. 1-8 with said substrate, such that said substrate is processed.

23. A pharmaceutical composition comprising the protein complex of any of No. 1-8 and/or any of the following the proteins:

[1144] (i) “ATP-binding cassette, sub-family A, member 3” (SEQ ID No:103) or a functionally active derivative thereof, or a functionally active fragment thereof, or a homolog thereof, or a variant of “ATP-binding cassette, sub-family A, member 3” encoded by a nucleic acid that hybridizes to the “ATP-binding cassette, sub-family A, member 3” nucleic acid or its complement under low stringency conditions,

[1145] (ii) “CGI-13” (SEQ ID No:72) or a functionally active derivative thereof, or a functionally active fragment thereof, or a homolog thereof, or a variant of “CGI-13” encoded by a nucleic acid that hybridizes to the “CGI-13” nucleic acid or its complement under low stringency conditions,

[1146] (iii) “ENSG00000144840” (SEQ ID No:79) or a functionally active derivative thereof, or a functionally active fragment thereof, or a homolog thereof, or a variant of “ENSG00000144840” encoded by a nucleic acid that hybridizes to the “ENSG00000144840” nucleic acid or its complement under low stringency conditions,

[1147] (iv) “FLJ20342” (SEQ ID No:56) or a functionally active derivative thereof, or a functionally active fragment thereof, or a homolog thereof, or a variant of “FLJ20342” encoded by a nucleic acid that hybridizes to the “FLJ20342” nucleic acid or its complement under low stringency conditions,

[1148] (v) “FLJ20481” (SEQ ID No:82) or a functionally active derivative thereof, or a functionally active fragment thereof, or a homolog thereof, or a variant of “FLJ20481” encoded by a nucleic acid that hybridizes to the “FLJ20481” nucleic acid or its complement under low stringency conditions,

[1149] (vi) “FLJ22390” (SEQ ID No:84) or a functionally active derivative thereof, or a functionally active fragment thereof, or a homolog thereof, or a variant of “FLJ22390” encoded by a nucleic acid that hybridizes to the “FLJ22390” nucleic acid or its complement under low stringency conditions,

[1150] (vii) “KIAA0095” (SEQ ID No:110) or a functionally active derivative thereof, or a functionally active fragment thereof, or a homolog thereof, or a variant of “KIAA0095” encoded by a nucleic acid that hybridizes to the “KIAA0095” nucleic acid or its complement under low stringency conditions,

[1151] (viii) “KIAA0922” (SEQ ID No:111) or a functionally active derivative thereof, or a functionally active fragment thereof, or a homolog thereof, or a variant of “KIAA0922” encoded by a nucleic acid that hybridizes to the “KIAA0922” nucleic acid or its complement under low stringency conditions,

[1152] (ix) “KIAA1181 (FRAGMENT)” (SEQ ID No:88) or a functionally active derivative thereof, or a functionally active fragment thereof, or a homolog thereof, or a variant of “KIAA1181 (FRAGMENT)” encoded by a nucleic acid that hybridizes to the “KIAA1181 (FRAGMENT)” nucleic acid or its complement under low stringency conditions,

[1153] (x) “KIAA1533 (FRAGMENT)” (SEQ ID No:89) or a functionally active derivative thereof, or a functionally active fragment thereof, or a homolog thereof, or a variant of “KIAA1533 (FRAGMENT)” encoded by a nucleic acid that hybridizes to the “KIAA1533 (FRAGMENT)” nucleic acid or its complement under low stringency conditions,

[1154] (xi) “PP1, regulatory subunit 15B” (SEQ ID No:93) or a functionally active derivative thereof, or a functionally active fragment thereof, or a homolog thereof, or a variant of “PP1, regulatory subunit 15B” encoded by a nucleic acid that hybridizes to the “PP1, regulatory subunit 15B” nucleic acid or its complement under low stringency conditions,

[1155] (xii) “RING finger protein 5” (SEQ ID No:98) or a functionally active derivative thereof, or a functionally active fragment thereof, or a homolog thereof, or a variant of “RING finger protein 5” encoded by a nucleic acid that hybridizes to the “RING finger protein 5” nucleic acid or its complement under low stringency conditions,

[1156] (xiii) “Thioredoxin domain-containing protein” (SEQ ID No:101) or a functionally active derivative thereof, or a functionally active fragment thereof, or a homolog thereof, or a variant of “Thioredoxin domain-containing protein” encoded by a nucleic acid that hybridizes to the “Thioredoxin domain-containing protein” nucleic acid or its complement under low stringency conditions, and/or

[1157] (xiv) “tyrosine phosphatase ensg00000149185” (SEQ ID No:86) or a functionally active derivative thereof, or a functionally active fragment thereof, or a homolog thereof, or a variant of “tyrosine phosphatase ensg00000149185” encoded by a nucleic acid that hybridizes to the “tyrosine phosphatase ensg00000149185” nucleic acid or its complement under low stringency conditions, and a pharmaceutical acceptable carrier.

24. A pharmaceutical composition according to No. 23 for the treatment of diseases and disorders such as neurodegenerative diseases such as Alzheimer's disease and related neurodegenerative disorders.

25. A method for screening for a molecule that binds to the complex of anyone of No. 1-8 and/or any of the following the proteins:

[1158] (i) “ATP-binding cassette, sub-family A, member 3” (SEQ ID No:103) or a functionally active derivative thereof, or a functionally active fragment thereof, or a homolog thereof, or a variant of “ATP-binding cassette, sub-family A, member 3” encoded by a nucleic acid that hybridizes to the “ATP-binding cassette, sub-family A, member 3” nucleic acid or its complement under low stringency conditions,

[1159] (ii) “CGI-13” (SEQ ID No:72) or a functionally active derivative thereof, or a functionally active fragment thereof, or a homolog thereof, or a variant of “CGI-13” encoded by a nucleic acid that hybridizes to the “CGI-13” nucleic acid or its complement under low stringency conditions,

[1160] (iii) “ENSG00000144840” (SEQ ID No:79) or a functionally active derivative thereof, or a functionally active fragment thereof, or a homolog thereof, or a variant of “ENSG00000144840” encoded by a nucleic acid that hybridizes to the “ENSG00000144840” nucleic acid or its complement under low stringency conditions,

[1161] (iv) “FLJ20342” (SEQ ID No:56) or a functionally active derivative thereof, or a functionally active fragment thereof, or a homolog thereof, or a variant of “FLJ20342” encoded by a nucleic acid that hybridizes to the “FLJ20342” nucleic acid or its complement under low stringency conditions,

[1162] (v) “FLJ20481” (SEQ ID No:82) or a functionally active derivative thereof, or a functionally active fragment thereof, or a homolog thereof, or a variant of “FLJ20481” encoded by a nucleic acid that hybridizes to the “FLJ20481” nucleic acid or its complement under low stringency conditions,

[1163] (vi) “FLJ22390” (SEQ ID No:84) or a functionally active derivative thereof, or a functionally active fragment thereof, or a homolog thereof, or a variant of “FLJ22390” encoded by a nucleic acid that hybridizes to the “FLJ22390” nucleic acid or its complement under low stringency conditions,

[1164] (vii) “KIAA0095” (SEQ ID No:110) or a functionally active derivative thereof, or a functionally active fragment thereof, or a homolog thereof, or a variant of “KIAA0095” encoded by a nucleic acid that hybridizes to the “KIAA0095” nucleic acid or its complement under low stringency conditions,

[1165] (viii) “KIAA0922” (SEQ ID No:111) or a functionally active derivative thereof, or a functionally active fragment thereof, or a homolog thereof, or a variant of “KIAA0922” encoded by a nucleic acid that hybridizes to the “KIAA0922” nucleic acid or its complement under low stringency conditions,

[1166] (ix) “KIAA1181 (FRAGMENT)” (SEQ ID No:88) or a functionally active derivative thereof, or a functionally active fragment thereof, or a homolog thereof, or a variant of “KIAA1181 (FRAGMENT)” encoded by a nucleic acid that hybridizes to the “KIAA1181 (FRAGMENT)” nucleic acid or its complement under low stringency conditions,

[1167] (x). “KIAA1533 (FRAGMENT)” (SEQ ID No:89) or a functionally active derivative thereof, or a functionally active fragment thereof, or a homolog thereof, or a variant of “KIAA1533 (FRAGMENT)” encoded by a nucleic acid that hybridizes to the “KIAA1533 (FRAGMENT)” nucleic acid or its complement under low stringency conditions,

[1168] (xi) “PP1, regulatory subunit 15B” (SEQ ID No:93) or a functionally active derivative thereof, or a functionally active fragment thereof, or a homolog thereof, or a variant of “PP1, regulatory subunit 15B” encoded by a nucleic acid that hybridizes to the “PP1, regulatory subunit 15B” nucleic acid or its complement under low stringency conditions,

[1169] (xii) “RING finger protein 5” (SEQ ID No:98) or a functionally active derivative thereof, or a functionally active fragment thereof, or a homolog thereof, or a variant of “RING finger protein 5” encoded by a nucleic acid that hybridizes to the “RING finger protein 5” nucleic acid or its complement under low stringency conditions,

[1170] (xiii) “Thioredoxin domain-containing protein” (SEQ ID No:101) or a functionally active derivative thereof, or a functionally active fragment thereof, or a homolog thereof, or a variant of “Thioredoxin domain-containing protein” encoded by a nucleic acid that hybridizes to the “Thioredoxin domain-containing protein” nucleic acid or its complement under low stringency conditions, and/or

[1171] (xiv) “tyrosine phosphatase ensg00000149185” (SEQ ID No:86) or a functionally active derivative thereof, or a functionally active fragment thereof, or a homolog thereof, or a variant of “tyrosine phosphatase ensg00000149185” encoded by a nucleic acid that hybridizes to the “tyrosine phosphatase ensg00000149185” nucleic acid or its complement under low stringency conditions, comprising the steps of

(a) exposing said complex, or a cell or organism containing same to one or more candidate molecules; and

(b) determining whether said candidate molecule is bound to the complex or protein.

[1172] 26. A method for screening for a molecule that modulates directly or indirectly the function, activity, composition or formation of the complex of any one of No. 1-8 comprising the steps of (a) exposing said complex, or a cell or organism containing Nicastrin complex to one or more candidate molecules; and

[1173] (b) determining the amount of activity of protein components of, and/or intracellular localization of, said complex and/or the transcription level of a gene dependent on the complex and/or the abundance and/or activity of a protein or protein complex dependent on the function of the complex and/or product of a gene dependent on the complex in the presence of the one or more candidate molecules, wherein a change in said amount, activity, protein components or intracellular localization relative to said amount, activity, protein components and/or intracellular localization and/or a change in the transcription level of a gene dependent on the complex and/or the abundance and/or activity of a protein or protein complex dependent on the function of the complex and/or product of a gene dependent on the complex in the absence of said candidate molecules indicates that the molecule modulates function, activity or composition of said complex.

27. The method of No. 26, wherein the amount of said complex is determined.

28. The method of No. 26, wherein the activity of said complex is determined.

[1174] 29. The method of No. 28, wherein said determining step comprises isolating from the cell or organism said complex to produce said isolated complex and contacting said isolated complex in the presence or absence of a candidate molecule with a substrate of said complex and determining the processing of said substrate is modified in the presence of said candidate molecule.

30. The method of No. 26, wherein the amount of the individual protein components of said complex are determined.

31. The method of No. 30, wherein said determining step comprises determining whether

[1175] (i) “18 kDa microsomal signal peptidase subunit” (SEQ ID No:53) or a functionally active derivative thereof, or a functionally active fragment thereof, or a homolog thereof, or a variant of “18 kDa microsomal signal peptidase subunit” encoded by a nucleic acid that hybridizes to the “18 kDa microsomal signal peptidase subunit” nucleic acid or its complement under low stringency conditions, and/or

[1176] (ii) “25 kDa microsomal signal peptidase subunit” (SEQ ID No:119) or a functionally active derivative thereof, or a functionally active fragment thereof, or a homolog thereof, or a variant of “25 kDa microsomal signal peptidase subunit” encoded by a nucleic acid that hybridizes to the “25 kDa microsomal signal peptidase subunit” nucleic acid or its complement under low stringency conditions, and/or

[1177] (iii) “ATP-binding cassette, sub-family A, member 3” (SEQ ID No:103) or a functionally active derivative thereof, or a functionally active fragment thereof, or a homolog thereof, or a variant of “ATP-binding cassette, sub-family A, member 3” encoded by a nucleic acid that hybridizes to the “Aph-binding cassette, sub-family A, member 3” nucleic acid or its complement under low stringency conditions, and/or

[1178] (iv) “Aph-1a” (SEQ ID No:1) or a functionally active derivative thereof, or a functionally active fragment thereof, or a homolog thereof, or a variant of “Aph-1a” encoded by a nucleic acid that hybridizes to the “Aph-1a” nucleic acid or its complement under low stringency conditions, and/or

[1179] (v) “BACE1” (SEQ ID No:38) or a functionally active derivative thereof, or a functionally active fragment thereof, or a homolog thereof, or a variant of “BACE1” encoded by a nucleic acid that hybridizes to the “BACE1” nucleic acid or its complement under low stringency conditions, and/or

[1180] (vi) “BSCv protein (FRAGMENT)” (SEQ ID No:70) or a functionally active derivative thereof, or a functionally active fragment thereof, or a homolog thereof, or a variant of “BSCv protein (FRAGMENT)” encoded by a nucleic acid that hybridizes to the “BSCv protein (FRAGMENT)” nucleic acid or its complement under low stringency conditions, and/or

[1181] (vii) “CAMK4” (SEQ ID No:104) or a functionally active derivative thereof, or a functionally active fragment thereof, or a homolog thereof, or a variant of “CAMK4” encoded by a nucleic acid that hybridizes to the “CAMK4” nucleic acid or its complement under low stringency conditions, and/or

[1182] (viii) “CGI-13” (SEQ ID No:72) or a functionally active derivative thereof, or a functionally active fragment thereof, or a homolog thereof, or a variant of “CGI-13” encoded by a nucleic acid that hybridizes to the “CGI-13” nucleic acid or its complement under low stringency conditions, and/or

[1183] (ix) “Casein kinase II beta chain” (SEQ ID No:74) or a functionally active derivative thereof, or a functionally active fragment thereof, or a homolog thereof, or a variant of “Casein kinase II beta chain” encoded by a nucleic acid that hybridizes to the “Casein kinase II beta chain” nucleic acid or its complement under low stringency conditions, and/or

[1184] (x) “Cathepsin B” (SEQ ID No:75) or a functionally active derivative thereof, or a functionally active fragment thereof, or a homolog thereof, or a variant of “Cathepsin B” encoded by a nucleic acid that hybridizes to the “Cathepsin B” nucleic acid or its complement under low stringency conditions, and/or

[1185] (xi) “DCTN1” (SEQ ID No:106) or a functionally active derivative thereof, or a functionally active fragment thereof, or a homolog thereof, or a variant of “DCTN1” encoded by a nucleic acid that hybridizes to the “DCTN1” nucleic acid or its complement under low stringency conditions, and/or

[1186] (xii) “Delta-6 fatty acid desaturase” (SEQ ID No:76) or a functionally active derivative thereof, or a functionally active fragment thereof, or a homolog thereof, or a variant of “Delta-6 fatty acid desaturase” encoded by a nucleic acid that hybridizes to the “Delta-6 fatty acid desaturase” nucleic acid or its complement under low stringency conditions, and/or

[1187] (xiii) “ENSG00000144840” (SEQ ID No:79) or a functionally active derivative thereof, or a functionally active fragment thereof, or a homolog thereof, or a variant of “ENSG00000144840” encoded by a nucleic acid that hybridizes to the “ENSG00000144840” nucleic acid or its complement under low stringency conditions, and/or

[1188] (xiv) “FACL3” (SEQ ID No:108) or a functionally active derivative thereof, or a functionally active fragment thereof, or a homolog thereof, or a variant of “FACL3” encoded by a nucleic acid that hybridizes to the “FACL3” nucleic acid or its complement under low stringency conditions, and/or

[1189] (xv) “FACL4” (SEQ ID No:109) or a functionally active derivative thereof, or a functionally active fragment thereof, or a homolog thereof, or a variant of “FACL4” encoded by a nucleic acid that hybridizes to the “FACL4” nucleic acid or its complement under low stringency conditions, and/or

[1190] (xvi) “FLJ13977” (SEQ ID No:81) or a functionally active derivative thereof, or a functionally active fragment thereof, or a homolog thereof, or a variant of “FLJ13977” encoded by a nucleic acid that hybridizes to the “FLJ13977” nucleic acid or its complement under low stringency conditions, and/or

[1191] (xvii) “FLJ20342” (SEQ ID No:56) or a functionally active derivative thereof, or a functionally active fragment thereof, or a homolog thereof, or a variant of “FLJ20342” encoded by a nucleic acid that hybridizes to the “FLJ20342” nucleic acid or its complement under low stringency conditions, and/or

[1192] (xviii) “FLJ20481” (SEQ ID No:82) or a functionally active derivative thereof, or a functionally active fragment thereof, or a homolog thereof, or a variant of “FLJ20481” encoded by a nucleic acid that hybridizes to the “FLJ20481” nucleic acid or its complement under low stringency conditions, and/or

[1193] (xix) “FLJ22390” (SEQ ID No:84) or a functionally active derivative thereof, or a functionally active fragment thereof, or a homolog thereof, or a variant of “FLJ22390” encoded by a nucleic acid that hybridizes to the “FLJ22390” nucleic acid or its complement under low stringency conditions, and/or

[1194] (xx) “ICAM-2” (SEQ ID No:87) or a functionally active derivative thereof, or a functionally active fragment thereof, or a homolog thereof, or a variant of “ICAM-2” encoded by a nucleic acid that hybridizes to the “ICAM-2” nucleic acid or its complement under low stringency conditions, and/or

[1195] (xxi) “KIAA0095” (SEQ ID No:110) or a functionally active derivative thereof, or a functionally active fragment thereof, or a homolog thereof, or a variant of “KIAA0095” encoded by a nucleic acid that hybridizes to the “KIAA0095” nucleic acid or its complement under low stringency conditions, and/or

[1196] (xxii) “KIAA0922” (SEQ ID No:111) or a functionally active derivative thereof, or a functionally active fragment thereof, or a homolog thereof, or a variant of “KIAA0922” encoded by a nucleic acid that hybridizes to the “KIAA0922” nucleic acid or its complement under low stringency conditions, and/or

[1197] (xxiii) “KIAA1181 (FRAGMENT)” (SEQ ID No:88) or a functionally active derivative thereof, or a functionally active fragment thereof, or a homolog thereof, or a variant of “KIAA1181 (FRAGMENT)” encoded by a nucleic acid that hybridizes to the “KIAA1181 (FRAGMENT)” nucleic acid or its complement under low stringency conditions, and/or

[1198] (xxiv) “KIAA1533 (FRAGMENT)” (SEQ ID No:89) or a functionally active derivative thereof, or a functionally active fragment thereof, or a homolog thereof, or a variant of “KIAA1533 (FRAGMENT)” encoded by a nucleic acid that hybridizes to the “KIAA1533 (FRAGMENT)” nucleic acid or its complement under low stringency conditions, and/or

[1199] (xxv) “Mesenchymal stem cell protein DSCD75” (SEQ ID No:91) or a functionally active derivative thereof, or a functionally active fragment thereof, or a homolog thereof, or a variant of “Mesenchymal stem cell protein DSCD75” encoded by a nucleic acid that hybridizes to the “Mesenchymal stem cell protein DSCD75” nucleic acid or its complement under low stringency conditions, and/or

[1200] (xxvi) “NICE-3” (SEQ ID No:58) or a functionally active derivative thereof, or a functionally active fragment thereof, or a homolog thereof, or a variant of “NICE-3” encoded by a nucleic acid that hybridizes to the “NICE-3” nucleic acid or its complement under low stringency conditions, and/or

[1201] (xxvii) “Neurotrypsin” (SEQ ID No:92) or a functionally active derivative thereof, or a functionally active fragment thereof, or a homolog thereof, or a variant of “Neurotrypsin” encoded by a nucleic acid that hybridizes to the “Neurotrypsin” nucleic acid or its complement under low stringency conditions, and/or

[1202] (xxviii) “Nicastrin” (SEQ ID No:9) or a functionally active derivative thereof, or a functionally active fragment thereof, or a homolog thereof, or a variant of “Nicastrin” encoded by a nucleic acid that hybridizes to the “Nicastrin” nucleic acid or its complement under low stringency conditions, and/or

[1203] (xxix) “PAS domain containing serine/threonine kinase” (SEQ ID No:112) or a functionally active derivative thereof, or a functionally active fragment thereof, or a homolog thereof, or a variant of “PAS domain containing serine/threonine kinase” encoded by a nucleic acid that hybridizes to the “PAS domain containing serine/threonine kinase” nucleic acid or its complement under low stringency conditions, and/or

[1204] (xxx) “PP1, regulatory subunit 15B” (SEQ ID No:93) or a functionally active derivative thereof, or a functionally active fragment thereof, or a homolog thereof, or a variant of “PP1, regulatory subunit 15B” encoded by a nucleic acid that hybridizes to the “PP1, regulatory subunit 15B” nucleic acid or its complement under low stringency conditions, and/or

[1205] (xxxi) “Pen-2” (SEQ ID No:10) or a functionally active derivative thereof, or a functionally active fragment thereof, or a homolog thereof, or a variant of “Pen-2” encoded by a nucleic acid that hybridizes to the “Pen-2” nucleic acid or its complement under low stringency conditions, and/or

[1206] (xxxii) “Presenilin-1” (SEQ ID No:14) or a functionally active derivative thereof, or a functionally active fragment thereof, or a homolog thereof, or a variant of “Presenilin-1” encoded by a nucleic acid that hybridizes to the “Presenilin-1” nucleic acid or its complement under low stringency conditions, and/or

[1207] (xxxiii) “Presenilin-2” (SEQ ID No:66) or a functionally active derivative thereof, or a functionally active fragment thereof, or a homolog thereof, or a variant of “Presenilin-2” encoded by a nucleic acid that hybridizes to the “Presenilin-2” nucleic acid or its complement under low stringency conditions, and/or

[1208] (xxxiv) “Protein amplified in osteosarcoma (OS-9)” (SEQ ID No:94) or a functionally active derivative thereof, or a functionally active fragment thereof, or a homolog thereof, or a variant of “Protein amplified in osteosarcoma (OS-9)” encoded by a nucleic acid that hybridizes to the “Protein amplified in osteosarcoma (OS-9)” nucleic acid or its complement under low stringency conditions, and/or

[1209] (xxxv) “Protein similar to stromal cell-derived factor 2” (SEQ ID No:95) or a functionally active derivative thereof, or a functionally active fragment thereof, or a homolog thereof, or a variant of “Protein similar to stromal cell-derived factor 2” encoded by a nucleic acid that hybridizes to the “Protein similar to stromal cell-derived factor 2” nucleic acid or its complement under low stringency conditions, and/or

[1210] (xxxvi) “Protocadherin beta 8” (SEQ ID No:96) or a functionally active derivative thereof, or a functionally active fragment thereof, or a homolog thereof, or a variant of “Protocadherin beta 8” encoded by a nucleic acid that hybridizes to the “Protocadherin beta 8” nucleic acid or its complement under low stringency conditions, and/or

[1211] (xxxvii) “REP8 protein” (SEQ ID No:97) or a functionally active derivative thereof, or a functionally active fragment thereof, or a homolog thereof, or a variant of “REP8 protein” encoded by a nucleic acid that hybridizes to the “REP8 protein” nucleic acid or its complement under low stringency conditions, and/or

[1212] (xxxviii) “RING finger protein 5” (SEQ ID No:98) or a functionally active derivative thereof, or a functionally active fragment thereof, or a homolog thereof, or a variant of “RING finger protein 5” encoded by a nucleic acid that hybridizes to the “RING finger protein 5” nucleic acid or its complement under low stringency conditions, and/or

[1213] (xxxix) “Retinal short-chain dehydrogenase/reductase retSDR2” (SEQ ID No:99) or a functionally active derivative thereof, or a functionally active fragment thereof, or a homolog thereof, or a variant of “Retinal short-chain dehydrogenase/reductase retSDR2” encoded by a nucleic acid that hybridizes to the “Retinal short-chain dehydrogenase/reductase retSDR2” nucleic acid or its complement under low stringency conditions, and/or

[1214] (xl) “Stromal cell-derived factor 2-like 1” (SEQ ID No:100) or a functionally active derivative thereof, or a functionally active fragment thereof, or a homolog thereof, or a variant of “Stromal cell-derived factor 2-like 1” encoded by a nucleic acid that hybridizes to the “Stromal cell-derived factor 2-like 1” nucleic acid or its complement under low stringency conditions, and/or

[1215] (xli) “Thioredoxin domain-containing protein” (SEQ ID No:101) or a functionally active derivative thereof, or a functionally active fragment thereof, or a homolog thereof, or a variant of “Thioredoxin domain-containing protein” encoded by a nucleic acid that hybridizes to the “Thioredoxin domain-containing protein” nucleic acid or its complement under low stringency conditions, and/or

[1216] (xlii) “homolog of yeast golgi membrane protein yif1p (yip1p-interacting factor)” (SEQ ID No:113) or a functionally active derivative thereof, or a functionally active fragment thereof, or a homolog thereof, or a variant of “homolog of yeast golgi membrane protein yif1p (yip1p-interacting factor)” encoded by a nucleic acid that hybridizes to the “homolog of yeast golgi membrane protein yif1p (yip1p-interacting factor)” nucleic acid or its complement under low stringency conditions, and/or

[1217] (xliii) “tyrosine phosphatase ensg00000149185” (SEQ ID No:86) or a functionally active derivative thereof, or a functionally active fragment thereof, or a homolog thereof, or a variant of “tyrosine phosphatase ensg00000149185” encoded by a nucleic acid that hybridizes to the “tyrosine phosphatase ensg00000149185” nucleic acid or its complement under low stringency conditions, is present in the complex.

32. The method of any of No. 26-31, wherein said method is a method of screening for a drug for treatment or prevention of a disease or disorder such as neurodegenerative diseases such as Alzheimer's disease and related neurodegenerative disorders.

[1218] 33. Use of a molecule that modulates the amount of, activity of, or the protein components of the complex of any one of No. 1-8 for the manufacture of a medicament for the treatment or prevention of a disease or disorder such as neurodegenerative diseases such as Alzheimer's disease and related neurodegenerative disorders.

[1219] 34. A method for the production of a pharmaceutical composition comprising carrying out the method of any of No. 1-8 to identify a molecule that modulates the function, activity, composition or formation of said complex, and further comprising mixing the identified molecule with a pharmaceutically acceptable carrier.

[1220] 35. A method for diagnosing or screening for the presence of a disease or disorder or a predisposition for developing a disease or disorder in a subject, which disease or disorder is characterized by an aberrant amount of, activity of, or component composition of, or intracellular localization of the complex of any one of the No. 1-8, comprising determining the amount of, activity of, protein components of, and/or intracellular localization of, said complex and/or the transcription level of a gene dependent on the complex and/or the abundance and/or activity of a protein or protein complex dependent on the function of the complex and/or product of a gene dependent on the complex in a comparative sample derived from a subject, wherein a difference in said amount, activity, or protein components of, said complex in an analogous sample from a subject not having the disease or disorder or predisposition indicates the presence in the subject of the disease or disorder or predisposition in the subject.

36. The method of No. 35, wherein the amount of said complex is determined.

37. The method of No. 35, wherein the activity of said complex is determined.

[1221] 38. The method of No. 37, wherein said determining step comprises isolating from the subject said complex to produce said isolated complex and contacting said isolated complex in the presence or absence of a candidate molecule with a substrate of said complex and determining whether said substrate is processed in the absence of the candidate molecule and whether the processing of said substrate is modified in the presence of said candidate molecule.

39. The method of No. 35, wherein the amount of the individual protein components of said complex is determined.

40. The method of No. 39, wherein said determining step comprises determining whether

[1222] (i) “18 kDa microsomal signal peptidase subunit” (SEQ ID No:53) or a functionally active derivative thereof, or a functionally active fragment thereof, or a homolog thereof, or a variant of “18 kDa microsomal signal peptidase subunit” encoded by a nucleic acid that hybridizes to the “18 kDa microsomal signal peptidase subunit” nucleic acid or its complement under low stringency conditions, and/or

[1223] (ii) “25 kDa microsomal signal peptidase subunit” (SEQ ID No:119) or a functionally active derivative thereof, or a functionally active fragment thereof, or a homolog thereof, or a variant of “25 kDa microsomal signal peptidase subunit” encoded by a nucleic acid that hybridizes to the “25 kDa microsomal signal peptidase subunit” nucleic acid or its complement under low stringency conditions, and/or

[1224] (iii) “ATP-binding cassette, sub-family A, member 3” (SEQ ID No:103) or a functionally active derivative thereof, or a functionally active fragment thereof, or a homolog thereof, or a variant of “ATP-binding cassette, sub-family A, member 3” encoded by a nucleic acid that hybridizes to the “ATP-binding cassette, sub-family A, member 3” nucleic acid or its complement under low stringency conditions, and/or

[1225] (iv) “Aph-1a” (SEQ ID No:1) or a functionally active derivative thereof, or a functionally active fragment thereof, or a homolog thereof, or a variant of “Aph-1a” encoded by a nucleic acid that hybridizes to the “Aph-1a” nucleic acid or its complement under low stringency conditions, and/or

[1226] (v) “BACE1” (SEQ ID No:38) or a functionally active derivative thereof, or a functionally active fragment thereof, or a homolog thereof, or a variant of “BACE1” encoded by a nucleic acid that hybridizes to the “BACE1” nucleic acid or its complement under low stringency conditions, and/or

[1227] (vi) “BSCv protein (FRAGMENT)” (SEQ ID No:70) or a functionally active derivative thereof, or a functionally active fragment thereof, or a homolog thereof, or a variant of “BSCv protein (FRAGMENT)” encoded by a nucleic acid that hybridizes to the “BSCv protein (FRAGMENT)” nucleic acid or its complement under low stringency conditions, and/or

[1228] (vii) “CAMK4” (SEQ ID No:104) or a functionally active derivative thereof, or a functionally active fragment thereof, or a homolog thereof, or a variant of “CAMK4” encoded by a nucleic acid that hybridizes to the “CAMK4” nucleic acid or its complement under low stringency conditions, and/or

[1229] (viii) “CGI-13” (SEQ ID No:72) or a functionally active derivative thereof, or a functionally active fragment thereof, or a homolog thereof, or a variant of “CGI-13” encoded by a nucleic acid that hybridizes to the “CGI-13” nucleic acid or its complement under low stringency conditions, and/or

[1230] (ix) “Casein kinase II beta chain” (SEQ ID No:74) or a functionally active derivative thereof, or a functionally active fragment thereof, or a homolog thereof, or a variant of “Casein kinase II beta chain” encoded by a nucleic acid that hybridizes to the “Casein kinase II beta chain” nucleic acid or its complement under low stringency conditions, and/or

[1231] (x) “Cathepsin B” (SEQ ID No:75) or a functionally active derivative thereof, or a functionally active fragment thereof, or a homolog thereof, or a variant of “Cathepsin B” encoded by a nucleic acid that hybridizes to the “Cathepsin B” nucleic acid or its complement under low stringency conditions, and/or

[1232] (xi) “DCTN1” (SEQ ID No:106) or a functionally active derivative thereof, or a functionally active fragment thereof, or a homolog thereof, or a variant of “DCTN1” encoded by a nucleic acid that hybridizes to the “DCTN1” nucleic acid or its complement under low stringency conditions, and/or

[1233] (xii) “Delta-6 fatty acid desaturase” (SEQ ID No:76) or a functionally active derivative thereof, or a functionally active fragment thereof, or a homolog thereof, or a variant of “Delta-6 fatty acid desaturase” encoded by a nucleic acid that hybridizes to the “Delta-6 fatty acid desaturase” nucleic acid or its complement under low stringency conditions, and/or

[1234] (xiii) “ENSG00000144840” (SEQ ID No:79) or a functionally active derivative thereof, or a functionally active fragment thereof, or a homolog thereof, or a variant of “ENSG00000144840” encoded by a nucleic acid that hybridizes to the “ENSG00000144840” nucleic acid or its complement under low stringency conditions, and/or

[1235] (xiv) “FACL3” (SEQ ID No:108) or a functionally active derivative thereof, or a functionally active fragment thereof, or a homolog thereof, or a variant of “FACL3” encoded by a nucleic acid that hybridizes to the “FACL3” nucleic acid or its complement under low stringency conditions, and/or

[1236] (xv) “FACL4” (SEQ ID No:109) or a functionally active derivative thereof, or a functionally active fragment thereof, or a homolog thereof, or a variant of “FACL4” encoded by a nucleic acid that hybridizes to the “FACL4” nucleic acid or its complement under low stringency conditions, and/or

[1237] (xvi) “FLJ13977” (SEQ ID No:81) or a functionally active derivative thereof, or a functionally active fragment thereof, or a homolog thereof, or a variant of “FLJ13977” encoded by a nucleic acid that hybridizes to the “FLJ13977” nucleic acid or its complement under low stringency conditions, and/or

[1238] (xvii) “FLJ20342” (SEQ ID No:56) or a functionally active derivative thereof, or a functionally active fragment thereof, or a homolog thereof, or a variant of “FLJ20342” encoded by a nucleic acid that hybridizes to the “FLJ20342” nucleic acid or its complement under low stringency conditions, and/or

[1239] (xviii) “FLJ20481” (SEQ ID No:82) or a functionally active derivative thereof, or a functionally active fragment thereof, or a homolog thereof, or a variant of “FLJ20481” encoded by a nucleic acid that hybridizes to the “FLJ20481” nucleic acid or its complement under low stringency conditions, and/or

[1240] (xix) “FLJ22390” (SEQ ID No:84) or a functionally active derivative thereof, or a functionally active fragment thereof, or a homolog thereof, or a variant of “FLJ22390” encoded by a nucleic acid that hybridizes to the “FLJ22390” nucleic acid or its complement under low stringency conditions, and/or

[1241] (xx) “ICAM-2” (SEQ ID No:87) or a functionally active derivative thereof, or a functionally active fragment thereof, or a homolog thereof, or a variant of “ICAM-2” encoded by a nucleic acid that hybridizes to the “ICAM-2” nucleic acid or its complement under low stringency conditions, and/or

[1242] (xxi) “KIAA0095” (SEQ ID No:110) or a functionally active derivative thereof, or a functionally active fragment thereof, or a homolog thereof, or a variant of “KIAA0095” encoded by a nucleic acid that hybridizes to the “KIAA0095” nucleic acid or its complement under low stringency conditions, and/or

[1243] (xxii) “KIAA0922” (SEQ ID No:111) or a functionally active derivative thereof, or a functionally active fragment thereof, or a homolog thereof, or a variant of “KIAA0922” encoded by a nucleic acid that hybridizes to the “KIAA0922” nucleic acid or its complement under low stringency conditions, and/or

[1244] (xxiii) “KIAA1181 (FRAGMENT)” (SEQ ID No:88) or a functionally active derivative thereof, or a functionally active fragment thereof, or a homolog thereof, or a variant of “KIAA1181 (FRAGMENT)” encoded by a nucleic acid that hybridizes to the “KIAA1181 (FRAGMENT)” nucleic acid or its complement under low stringency conditions, and/or

[1245] (xxiv) “KIAA1533 (FRAGMENT)” (SEQ ID No:89) or a functionally active derivative thereof, or a functionally active fragment thereof, or a homolog thereof, or a variant of “KIAA1533 (FRAGMENT)” encoded by a nucleic acid that hybridizes to the “KIAA1533 (FRAGMENT)” nucleic acid or its complement under low stringency conditions, and/or

[1246] (xxv) “Mesenchymal stem cell protein DSCD75” (SEQ ID No:91) or a functionally active derivative thereof, or a functionally active fragment thereof, or a homolog thereof, or a variant of “Mesenchymal stem cell protein DSCD75” encoded by a nucleic acid that hybridizes to the “Mesenchymal stem cell protein DSCD75” nucleic acid or its complement under low stringency conditions, and/or

[1247] (xxvi) “NICE-3” (SEQ ID No:58) or a functionally active derivative thereof, or a functionally active fragment thereof, or a homolog thereof, or a variant of “NICE-3” encoded by a nucleic acid that hybridizes to the “NICE-3” nucleic acid or its complement under low stringency conditions, and/or

[1248] (xxvii) “Neurotrypsin” (SEQ ID No:92) or a functionally active derivative thereof, or a functionally active fragment thereof, or a homolog thereof, or a variant of “Neurotrypsin” encoded by a nucleic acid that hybridizes to the “Neurotrypsin” nucleic acid or its complement under low stringency conditions, and/or

[1249] (xxviii) “Nicastrin” (SEQ ID No:9) or a functionally active derivative thereof, or a functionally active fragment thereof, or a homolog thereof, or a variant of “Nicastrin” encoded by a nucleic acid that hybridizes to the “Nicastrin” nucleic acid or its complement under low stringency conditions, and/or

[1250] (xxix) “PAS domain containing serine/threonine kinase” (SEQ ID No:112) or a functionally active derivative thereof, or a functionally active fragment thereof, or a homolog thereof, or a variant of “PAS domain containing serine/threonine kinase” encoded by a nucleic acid that hybridizes to the “PAS domain containing serine/threonine kinase” nucleic acid or its complement under low stringency conditions, and/or

[1251] (xxx) “PP1, regulatory subunit 15B” (SEQ ID No:93) or a functionally active derivative thereof, or a functionally active fragment thereof, or a homolog thereof, or a variant of “PP1, regulatory subunit 15B” encoded by a nucleic acid that hybridizes to the “PP1, regulatory subunit 15B” nucleic acid or its complement under low stringency conditions, and/or

[1252] (xxxi) “Pen-2” (SEQ ID No:10) or a functionally active derivative thereof, or a functionally active fragment thereof, or a homolog thereof, or a variant of “Pen-2” encoded by a nucleic acid that hybridizes to the “Pen-2” nucleic acid or its complement under low stringency conditions, and/or

[1253] (xxxii) “Presenilin-1” (SEQ ID No:14) or a functionally active derivative thereof, or a functionally active fragment thereof, or a homolog thereof, or a variant of “Presenilin-1” encoded by a nucleic acid that hybridizes to the “Presenilin-1” nucleic acid or its complement under low stringency conditions, and/or

[1254] (xxxiii) “Presenilin-2” (SEQ ID No:66) or a functionally active derivative thereof, or a functionally active fragment thereof, or a homolog thereof, or a variant of “Presenilin-2” encoded by a nucleic acid that hybridizes to the “Presenilin-2” nucleic acid or its complement under low stringency conditions, and/or

[1255] (xxxiv) “Protein amplified in osteosarcoma (OS-9)” (SEQ ID No:94) or a functionally active derivative thereof, or a functionally active fragment thereof, or a homolog thereof, or a variant of “Protein amplified in osteosarcoma (OS-9)” encoded by a nucleic acid that hybridizes to the “Protein amplified in osteosarcoma (OS-9)” nucleic acid or its complement under low stringency conditions, and/or

[1256] (xxxv) “Protein similar to stromal cell-derived factor 2” (SEQ ID No:95) or a functionally active derivative thereof, or a functionally active fragment thereof, or a homolog thereof, or a variant of “Protein similar to stromal cell-derived factor 2” encoded by a nucleic acid that hybridizes to the “Protein similar to stromal cell-derived factor 2” nucleic acid or its complement under low stringency conditions, and/or

[1257] (xxxvi) “Protocadherin beta 8” (SEQ ID No:96) or a functionally active derivative thereof, or a functionally active fragment thereof, or a homolog thereof, or a variant of “Protocadherin beta 8” encoded by a nucleic acid that hybridizes to the “Protocadherin beta 8” nucleic acid or its complement under low stringency conditions, and/or

[1258] (xxxvii) “REP8 protein” (SEQ ID No:97) or a functionally active derivative thereof, or a functionally active fragment thereof, or a homolog thereof, or a variant of “REP8 protein” encoded by a nucleic acid that hybridizes to the “REP8 protein” nucleic acid or its complement under low stringency conditions, and/or

[1259] (xxxviii) “RING finger protein 5” (SEQ ID No:98) or a functionally active derivative thereof, or a functionally active fragment thereof, or a homolog thereof, or a variant of “RING finger protein 5” encoded by a nucleic acid that hybridizes to the “RING finger protein 5” nucleic acid or its complement under low stringency conditions, and/or

[1260] (xxxix) “Retinal short-chain dehydrogenase/reductase retSDR2” (SEQ ID No:99) or a functionally active derivative thereof, or a functionally active fragment thereof, or a homolog thereof, or a variant of “Retinal short-chain dehydrogenase/reductase retSDR2” encoded by a nucleic acid that hybridizes to the “Retinal short-chain dehydrogenase/reductase retSDR2” nucleic acid or its complement under low stringency conditions, and/or

[1261] (xl) “Stromal cell-derived factor 2-like 1” (SEQ ID No:100) or a functionally active derivative thereof, or a functionally active fragment thereof, or a homolog thereof, or a variant of “Stromal cell-derived factor 2-like 1” encoded by a nucleic acid that hybridizes to the “Stromal cell-derived factor 2-like 1” nucleic acid or its complement under low stringency conditions, and/or

[1262] (xli) “Thioredoxin domain-containing protein” (SEQ ID No:101) or a functionally active derivative thereof, or a functionally active fragment thereof, or a homolog thereof, or a variant of “Thioredoxin domain-containing protein” encoded by a nucleic acid that hybridizes to the “Thioredoxin domain-containing protein” nucleic acid or its complement under low stringency conditions, and/or

[1263] (xlii) “homolog of yeast golgi membrane protein yif1p (yip1p-interacting factor)” (SEQ ID No:113) or a functionally active derivative thereof, or a functionally active fragment thereof, or a homolog thereof, or a variant of “homolog of yeast golgi membrane protein yif1p (yip1p-interacting factor)” encoded by a nucleic acid that hybridizes to the “homolog of yeast golgi membrane protein yif1p (yip1p-interacting factor)” nucleic acid or its complement under low stringency conditions, and/or

[1264] (xliii) “tyrosine phosphatase ensg00000149185” (SEQ ID No:86) or a functionally active derivative thereof, or a functionally active fragment thereof, or a homolog thereof, or a variant of “tyrosine phosphatase ensg00000149185” encoded by a nucleic acid that hybridizes to the “tyrosine phosphatase ensg00000149185” nucleic acid or its complement under low stringency conditions, is present in the complex.

[1265] 41. The complex of any one of No. 1-8, or proteins of No. 13 or the antibody or fragment of No. 17, for use in a method of diagnosing a disease or disorder such as neurodegenerative diseases such as Alzheimer's disease and related neurodegenerative disorders.

[1266] 42. A method for treating or preventing a disease or disorder characterized by an aberrant amount of, activity or component composition of or intracellular localization of, the complex of anyone of No. 1-8, comprising administering to a subject in need of such treatment or prevention a therapeutically effective amount of one or more molecules that modulate the amount of, the production of Abeta-40 and Abeta-42 peptides by ELISA (e.g. by modifying the expression of one or several interacting proteins in cells by means of RNAi (siRNA) and/or plasmids encoding the interacting protein(s)), the production of C-terminal APP fragments in cell lines or transgenic animals by western blot (e.g. by modifying the expression of one or several interacting proteins in cells by means of RNAi (siRNA) and/or plasmids encoding the interacting protein(s)), the proteolytic activity of beta- or gamma secretases towards bacterially expressed APP fragments in vitro (e.g. by modifying the expression of one or several interacting proteins in cells by means of RNAi (siRNA) and/or plasmids encoding the interacting protein(s)) or transactivation of a Gal4-driven reporter gene (e.g. by modifying the expression of one or several interacting proteins in cells by means of RNAi (siRNA) and/or plasmids encoding the interacting protein(s)), or protein components of, said complex.

43. The method according to No. 42, wherein said disease or disorder involves decreased levels of the amount or activity of said complex.

44. The method according to No. 42, wherein said disease or disorder involves increased levels of the amount or activity of said complex.

45. Complex of any of No. 1-8 and/or protein selected from the following proteins

[1267] (i) “18 kDa microsomal signal peptidase subunit” (SEQ ID No:53) or a functionally active derivative thereof, or a functionally active fragment thereof, or a homolog thereof, or a variant of “18 kDa microsomal signal peptidase subunit” encoded by a nucleic acid that hybridizes to the “18 kDa microsomal signal peptidase subunit” nucleic acid or its complement under low stringency conditions,

[1268] (ii) “25 kDa microsomal signal peptidase subunit” (SEQ ID No:119) or a functionally active derivative thereof, or a functionally active fragment thereof, or a homolog thereof, or a variant of “25 kDa microsomal signal peptidase subunit” encoded by a nucleic acid that hybridizes to the “25 kDa microsomal signal peptidase subunit” nucleic acid or its complement under low stringency conditions,

[1269] (iii) “ATP-binding cassette, sub-family A, member 3” (SEQ ID No:103) or a functionally active derivative thereof, or a functionally active fragment thereof, or a homolog thereof, or a variant of “ATP-binding cassette, sub-family A, member 3” encoded by a nucleic acid that hybridizes to the “ATP-binding cassette, sub-family A, member 3” nucleic acid or its complement under low stringency conditions,

[1270] (iv) “Aph-1a” (SEQ ID No:1) or a functionally active derivative thereof, or a functionally active fragment thereof, or a homolog thereof, or a variant of “Aph-1a” encoded by a nucleic acid that hybridizes to the “Aph-1a” nucleic acid or its complement under low stringency conditions,

[1271] (v) “BACE1” (SEQ ID No:38) or a functionally active derivative thereof, or a functionally active fragment thereof, or a homolog thereof, or a variant of “BACE1” encoded by a nucleic acid that hybridizes to the “BACE1” nucleic acid or its complement under low stringency conditions,

[1272] (vi) “BSCv protein (FRAGMENT)” (SEQ ID No:70) or a functionally active derivative thereof, or a functionally active fragment thereof, or a homolog thereof, or a variant of “BSCv protein (FRAGMENT)” encoded by a nucleic acid that hybridizes to the “BSCv protein (FRAGMENT)” nucleic acid or its complement under low stringency conditions,

[1273] (vii) “CAMK4” (SEQ ID No:104) or a functionally active derivative thereof, or a functionally active fragment thereof, or a homolog thereof, or a variant of “CAMK4” encoded by a nucleic acid that hybridizes to the “CAMK4” nucleic acid or its complement under low stringency conditions,

[1274] (viii) “CGI-13” (SEQ ID No:72) or a functionally active derivative thereof, or a functionally active fragment thereof, or a homolog thereof, or a variant of “CGI-13” encoded by a nucleic acid that hybridizes to the “CGI-13” nucleic acid or its complement under low stringency conditions,

[1275] (ix) “Casein kinase II beta chain” (SEQ ID No:74) or a functionally active derivative thereof, or a functionally active fragment thereof, or a homolog thereof, or a variant of “Casein kinase II beta chain” encoded by a nucleic acid that hybridizes to the “Casein kinase II beta chain” nucleic acid or its complement under low stringency conditions,

[1276] (x) “Cathepsin B” (SEQ ID No:75) or a functionally active derivative thereof, or a functionally active fragment thereof, or a homolog thereof, or a variant of “Cathepsin B” encoded by a nucleic acid that hybridizes to the “Cathepsin B” nucleic acid or its complement under low stringency conditions,

[1277] (xi) “DCTN1” (SEQ ID No:106) or a functionally active derivative thereof, or a functionally active fragment thereof, or a homolog thereof, or a variant of “DCTN1” encoded by a nucleic acid that hybridizes to the “DCTN1” nucleic acid or its complement under low stringency conditions,

[1278] (xii) “Delta-6 fatty acid desaturase” (SEQ ID No:76) or a functionally active derivative thereof, or a functionally active fragment thereof, or a homolog thereof, or a variant of “Delta-6 fatty acid desaturase” encoded by a nucleic acid that hybridizes to the “Delta-6 fatty acid desaturase” nucleic acid or its complement under low stringency conditions,

[1279] (xiii) “ENSG00000144840” (SEQ ID No:79) or a functionally active derivative thereof, or a functionally active fragment thereof, or a homolog thereof, or a variant of “ENSG00000144840” encoded by a nucleic acid that hybridizes to the “ENSG00000144840” nucleic acid or its complement under low stringency conditions,

[1280] (xiv) “FACL3” (SEQ ID No:108) or a functionally active derivative thereof, or a functionally active fragment thereof, or a homolog thereof, or a variant of “FACL3” encoded by a nucleic acid that hybridizes to the “FACL3” nucleic acid or its complement under low stringency conditions,

[1281] (xv) “FACL4” (SEQ ID No:109) or a functionally active derivative thereof, or a functionally active fragment thereof, or a homolog thereof, or a variant of “FACL4” encoded by a nucleic acid that hybridizes to the “FACL4” nucleic acid or its complement under low stringency conditions,

[1282] (xvi) “FLJ13977” (SEQ ID No:81) or a functionally active derivative thereof, or a functionally active fragment thereof, or a homolog thereof, or a variant of “FLJ13977” encoded by a nucleic acid that hybridizes to the “FLJ13977” nucleic acid or its complement under low stringency conditions,

[1283] (xvii) “FLJ20342” (SEQ ID No:56) or a functionally active derivative thereof, or a functionally active fragment thereof, or a homolog thereof, or a variant of “FLJ20342” encoded by a nucleic acid that hybridizes to the “FLJ20342” nucleic acid or its complement under low stringency conditions,

[1284] (xviii) “FLJ20481” (SEQ ID No:82) or a functionally active derivative thereof, or a functionally active fragment thereof, or a homolog thereof, or a variant of “FLJ20481” encoded by a nucleic acid that hybridizes to the “FLJ20481” nucleic acid or its complement under low stringency conditions,

[1285] (xix) “FLJ22390” (SEQ ID No:84) or a functionally active derivative thereof, or a functionally active fragment thereof, or a homolog thereof, or a variant of “FLJ22390” encoded by a nucleic acid that hybridizes to the “FLJ22390” nucleic acid or its complement under low stringency conditions,

[1286] (xx) “ICAM-2” (SEQ ID No:87) or a functionally active derivative thereof, or a functionally active fragment thereof, or a homolog thereof, or a variant of “ICAM-2” encoded by a nucleic acid that hybridizes to the “ICAM-2” nucleic acid or its complement under low stringency conditions,

[1287] (xxi) “KIAA0095” (SEQ ID No:110) or a functionally active derivative thereof, or a functionally active fragment thereof, or a homolog thereof, or a variant of “KIAA0095” encoded by a nucleic acid that hybridizes to the “KIAA0095” nucleic acid or its complement under low stringency conditions,

[1288] (xxii) “KIAA0922” (SEQ ID No:111) or a functionally active derivative thereof, or a functionally active fragment thereof, or a homolog thereof, or a variant of “KIAA0922” encoded by a nucleic acid that hybridizes to the “KIAA0922” nucleic acid or its complement under low stringency conditions,

[1289] (xxiii) “KIAA1181 (FRAGMENT)” (SEQ ID No:88) or a functionally active derivative thereof, or a functionally active fragment thereof, or a homolog thereof, or a variant of “KIAA1181 (FRAGMENT)” encoded by a nucleic acid that hybridizes to the “KIAA1181 (FRAGMENT)” nucleic acid or its complement under low stringency conditions,

[1290] (xxiv) “KIAA1533 (FRAGMENT)” (SEQ ID No:89) or a functionally active derivative thereof, or a functionally active fragment thereof, or a homolog thereof, or a variant of “KIAA1533 (FRAGMENT)” encoded by a nucleic acid that hybridizes to the “KIAA1533 (FRAGMENT)” nucleic acid or its complement under low stringency conditions,

[1291] (xxv) “Mesenchymal stem cell protein DSCD75” (SEQ ID No:91) or a functionally active derivative thereof, or a functionally active fragment thereof, or a homolog thereof, or a variant of “Mesenchymal stem cell protein DSCD75” encoded by a nucleic acid that hybridizes to the “Mesenchymal stem cell protein DSCD75” nucleic acid or its complement under low stringency conditions,

[1292] (xxvi) “NICE-3” (SEQ ID No:58) or a functionally active derivative thereof, or a functionally active fragment thereof, or a homolog thereof, or a variant of “NICE-3” encoded by a nucleic acid that hybridizes to the “NICE-3” nucleic acid or its complement under low stringency conditions,

[1293] (xxvii) “Neurotrypsin” (SEQ ID No:92) or a functionally active derivative thereof, or a functionally active fragment thereof, or a homolog thereof, or a variant of “Neurotrypsin” encoded by a nucleic acid that hybridizes to the “Neurotrypsin” nucleic acid or its complement under low stringency conditions,

[1294] (xxviii) “Nicastrin” (SEQ ID No:9) or a functionally active derivative thereof, or a functionally active fragment thereof, or a homolog thereof, or a variant of “Nicastrin” encoded by a nucleic acid that hybridizes to the “Nicastrin” nucleic acid or its complement under low stringency conditions,

[1295] (xxix) “PAS domain containing serine/threonine kinase” (SEQ ID No:112) or a functionally active derivative thereof, or a functionally active fragment thereof, or a homolog thereof, or a variant of “PAS domain containing serine/threonine kinase” encoded by a nucleic acid that hybridizes to the “PAS domain containing serine/threonine kinase” nucleic acid or its complement under low stringency conditions,

[1296] (xxx) “PP1, regulatory subunit 15B” (SEQ ID No:93) or a functionally active derivative thereof, or a functionally active fragment thereof, or a homolog thereof, or a variant of “PP1, regulatory subunit 15B” encoded by a nucleic acid that hybridizes to the “PP1, regulatory subunit 15B” nucleic acid or its complement under low stringency conditions,

[1297] (xxxi) “Pen-2” (SEQ ID No:10) or a functionally active derivative thereof, or a functionally active fragment thereof, or a homolog thereof, or a variant of “Pen-2” encoded by a nucleic acid that hybridizes to the “Pen-2” nucleic acid or its complement under low stringency conditions,

[1298] (xxxii) “Presenilin-1” (SEQ ID No:14) or a functionally active derivative thereof, or a functionally active fragment thereof, or a homolog thereof, or a variant of “Presenilin-1” encoded by a nucleic acid that hybridizes to the “Presenilin-1” nucleic acid or its complement under low stringency conditions,

[1299] (xxxiii) “Presenilin-2” (SEQ ID No:66) or a functionally active derivative thereof, or a functionally active fragment thereof, or a homolog thereof, or a variant of “Presenilin-2” encoded by a nucleic acid that hybridizes to the “Presenilin-2” nucleic acid or its complement under low stringency conditions,

[1300] (xxxiv) “Protein amplified in osteosarcoma (OS-9)” (SEQ ID No:94) or a functionally active derivative thereof, or a functionally active fragment thereof, or a homolog thereof, or a variant of “Protein amplified in osteosarcoma (OS-9)” encoded by a nucleic acid that hybridizes to the “Protein amplified in osteosarcoma (OS-9)” nucleic acid or its complement under low stringency conditions,

[1301] (xxxv) “Protein similar to stromal cell-derived factor 2” (SEQ ID No:95) or a functionally active derivative thereof, or a functionally active fragment thereof, or a homolog thereof, or a variant of “Protein similar to stromal cell-derived factor 2” encoded by a nucleic acid that hybridizes to the “Protein similar to stromal cell-derived factor 2” nucleic acid or its complement under low stringency conditions,

[1302] (xxxvi) “Protocadherin beta 8” (SEQ ID No:96) or a functionally active derivative thereof, or a functionally active fragment thereof, or a homolog thereof, or a variant of “Protocadherin beta 8” encoded by a nucleic acid that hybridizes to the “Protocadherin beta 8” nucleic acid or its complement under low stringency conditions,

[1303] (xxxvii) “REP8 protein” (SEQ ID No:97) or a functionally active derivative thereof, or a functionally active fragment thereof, or a homolog thereof, or a variant of “REP8 protein” encoded by a nucleic acid that hybridizes to the “REP8 protein” nucleic acid or its complement under low stringency conditions,

[1304] (xxxviii) “RING finger protein 5” (SEQ ID No:98) or a functionally active derivative thereof, or a functionally active fragment thereof, or a homolog thereof, or a variant of “RING finger protein 5” encoded by a nucleic acid that hybridizes to the “RING finger protein 5” nucleic acid or its complement under low stringency conditions,

[1305] (xxxix) “Retinal short-chain dehydrogenase/reductase retSDR2” (SEQ ID No:99) or a functionally active derivative thereof, or a functionally active fragment thereof, or a homolog thereof, or a variant of “Retinal short-chain dehydrogenase/reductase retSDR2” encoded by a nucleic acid that hybridizes to the “Retinal short-chain dehydrogenase/reductase retSDR2” nucleic acid or its complement under low stringency conditions,

[1306] (xl) “Stromal cell-derived factor 2-like 1” (SEQ ID No:100) or a functionally active derivative thereof, or a functionally active fragment thereof, or a homolog thereof, or a variant of “Stromal cell-derived factor 2-like 1” encoded by a nucleic acid that hybridizes to the “Stromal cell-derived factor 2-like 1” nucleic acid or its complement under low stringency conditions,

[1307] (xli) “Thioredoxin domain-containing protein” (SEQ ID No:101) or a functionally active derivative thereof, or a functionally active fragment thereof, or a homolog thereof, or a variant of “Thioredoxin domain-containing protein” encoded by a nucleic acid that hybridizes to the “Thioredoxin domain-containing protein” nucleic acid or its complement under low stringency conditions,

[1308] (xlii) “homolog of yeast golgi membrane protein yif1p (yip1p-interacting factor)” (SEQ ID No:113) or a functionally active derivative thereof, or a functionally active fragment thereof, or a homolog thereof, or a variant of “homolog of yeast golgi membrane protein yif1p (yip1p-interacting factor)” encoded by a nucleic acid that hybridizes to the “homolog of yeast golgi membrane protein yif1p (yip1p-interacting factor)” nucleic acid or its complement under low stringency conditions, and/or (xliii) “tyrosine phosphatase ensg00000149185” (SEQ ID No:86) or a functionally active derivative thereof, or a functionally active fragment thereof, or a homolog thereof, or a variant of “tyrosine phosphatase ensg00000149185” encoded by a nucleic acid that hybridizes to the “tyrosine phosphatase ensg00000149185” nucleic acid or its complement under low stringency conditions, as a target for an active agent of a pharmaceutical, preferably a drug target in the treatment or prevention of a disease or disorder such as neurodegenerative diseases such as Alzheimer's disease and related neurodegenerative disorders.

[1309] Furthermore, the present invention relates to the Nicastrin-complex (c)

1. A protein complex selected from complex (not defined) and comprising

(a) at least one first protein selected from the group consisting of:

[1310] (i) “APP-C99” (SEQ ID No:120) or a functionally active derivative thereof, or a functionally active fragment thereof, or a homolog thereof, or a variant of “APP-C99” encoded by a nucleic acid that hybridizes to the “APP-C99” nucleic acid or its complement under low stringency conditions,

[1311] (ii) “Nicastrin” (SEQ ID No:9) or a functionally active derivative thereof, or a functionally active fragment thereof; or a homolog thereof, or a variant of “Nicastrin” encoded by a nucleic acid that hybridizes to the “Nicastrin” nucleic acid or its complement under low stringency conditions,

[1312] (iii) “Psen1” (SEQ ID No:3) or a functionally active derivative thereof, or a functionally active fragment thereof, or a homolog thereof, or a variant of “Psen1” encoded by a nucleic acid that hybridizes to the “Psen I” nucleic acid or its complement under low stringency conditions,

[1313] (iv) “aph-1a” (SEQ ID No:1) or a functionally active derivative thereof, or a functionally active fragment thereof, or a homolog thereof, or a variant of “aph-1a” encoded by a nucleic acid that hybridizes to the “aph-1a” nucleic acid or its complement under low stringency conditions,

[1314] (v) “APP” (SEQ ID No:23) or a functionally active derivative thereof, or a functionally active fragment thereof, or a homolog thereof, or a variant of “APP” encoded by a nucleic acid that hybridizes to the “APP” nucleic acid or its complement under low stringency conditions,

[1315] (vi) “CtnnA1” (SEQ ID No:47) or a functionally active derivative thereof, or a functionally active fragment thereof, or a homolog thereof, or a variant of “CtnnA1” encoded by a nucleic acid that hybridizes to the “CtnnA1” nucleic acid or its complement under low stringency conditions,

[1316] (vii) “CtnnA2” (SEQ ID No:48) or a functionally active derivative thereof, or a functionally active fragment thereof, or a homolog thereof, or a variant of “CtnnA2” encoded by a nucleic acid that hybridizes to the “CtnnA2” nucleic acid or its complement under low stringency conditions,

[1317] (viii) “CtnnB1” (SEQ ID No:46) or a functionally active derivative thereof, or a functionally active fragment thereof, or a homolog thereof, or a variant of “CtnnB1” encoded by a nucleic acid that hybridizes to the “CtnnB1” nucleic acid or its complement under low stringency conditions,

[1318] (ix) “CtnnD1” (SEQ ID No:49) or a functionally active derivative thereof, or a functionally active fragment thereof, or a homolog thereof, or a variant of “CtnnD1” encoded by a nucleic acid that hybridizes to the “CtnnD1” nucleic acid or its complement under low stringency conditions,

[1319] (x) “JUP” (SEQ ID No:2) or a functionally active derivative thereof, or a functionally active fragment thereof, or a homolog thereof, or a variant of “JUP” encoded by a nucleic acid that hybridizes to the “JUP” nucleic acid or its complement under low stringency conditions,

[1320] (xi) “NCadh” (SEQ ID No:50) or a functionally active derivative thereof, or a functionally active fragment thereof, or a homolog thereof, or a variant of “NCadh” encoded by a nucleic acid that hybridizes to the “NCadh” nucleic acid or its complement under low stringency conditions, and

(b) at least one first protein selected from the group consisting of:

[1321] (i) “ACAT1” (SEQ ID No:4) or a functionally active derivative thereof, or a functionally active fragment thereof, or a homolog thereof, or a variant of “ACAT1” encoded by a nucleic acid that hybridizes to the “ACAT1” nucleic acid or its complement under low stringency conditions,

[1322] (ii) “CGI-13” (SEQ ID No:72) or a functionally active derivative thereof, or a functionally active fragment thereof, or a homolog thereof, or a variant of “CGI-13” encoded by a nucleic acid that hybridizes to the “CGI-13” nucleic acid or its complement under low stringency conditions,

[1323] (iii) “CK2B” (SEQ ID No:59) or a functionally active derivative thereof, or a functionally active fragment thereof, or a homolog thereof, or a variant of “CK2B” encoded by a nucleic acid that hybridizes to the “CK2B” nucleic acid or its complement under low stringency conditions,

[1324] (iv) “CLGN” (SEQ ID No:54) or a functionally active derivative thereof, or a functionally active fragment thereof, or a homolog thereof, or a variant of “CLGN” encoded by a nucleic acid that hybridizes to the “CLGN” nucleic acid or its complement under low stringency conditions,

[1325] (v) “ECSIT” (SEQ ID No:55) or a functionally active derivative thereof, or a functionally active fragment thereof, or a homolog thereof, or a variant of “ECSIT” encoded by a nucleic acid that hybridizes to the “ECSIT” nucleic acid or its complement under low stringency conditions,

[1326] (vi) “FACL3” (SEQ ID No:11) or a functionally active derivative thereof, or a functionally active fragment thereof, or a homolog thereof, or a variant of “FACL3” encoded by a nucleic acid that hybridizes to the “FACL3” nucleic acid or its complement under low stringency conditions,

[1327] (vii) “FADS2” (SEQ ID No:40) or a functionally active derivative thereof, or a functionally active fragment thereof, or a homolog thereof, or a variant of “FADS2” encoded by a nucleic acid that hybridizes to the “FADS2” nucleic acid or its complement under low stringency conditions,

[1328] (viii) “FLJ20481” (SEQ ID No:82) or a functionally active derivative thereof, or a functionally active fragment thereof, or a homolog thereof, or a variant of “FLJ20481” encoded by a nucleic acid that hybridizes to the “FLJ20481” nucleic acid or its complement under low stringency conditions,

[1329] (ix) “ITM2C” (SEQ ID No:13) or a functionally active derivative thereof, or a functionally active fragment thereof, or a homolog thereof, or a variant of “ITM2C” encoded by a nucleic acid that hybridizes to the “12C” nucleic acid or its complement under low stringency conditions,

[1330] (x) “ITPR1” (SEQ ID No:16) or a functionally active derivative thereof, or a functionally active fragment thereof, or a homolog thereof, or a variant of “ITPR1” encoded by a nucleic acid that hybridizes to the “ITPR1” nucleic acid or its complement under low stringency conditions,

[1331] (xi) “KIAA0363” (SEQ ID No:105) or a functionally active derivative thereof, or a functionally active fragment thereof, or a homolog thereof, or a variant of “KIAA0363” encoded by a nucleic acid that hybridizes to the “KIAA0363” nucleic acid or its complement under low stringency conditions,

[1332] (xii) “MDR1” (SEQ ID No:18) or a functionally active derivative thereof, or a functionally active fragment thereof, or a homolog thereof, or a variant of “MDR1” encoded by a nucleic acid that hybridizes to the “MDR1” nucleic acid or its complement under low stringency conditions,

[1333] (xiii) “Neurotrypsin” (SEQ ID No:19) or a functionally active derivative thereof, or a functionally active fragment thereof, or a homolog thereof, or a variant of “Neurotrypsin” encoded by a nucleic acid that hybridizes to the “Neurotrypsin” nucleic acid or its complement under low stringency conditions,

[1334] (xiv) “PTP LOC114971” (SEQ ID No:60) or a functionally active derivative thereof, or a functionally active fragment thereof, or a homolog thereof, or a variant of “PTP LOC114971” encoded by a nucleic acid that hybridizes to the “PTP LOC114971” nucleic acid or its complement under low stringency conditions,

[1335] (xv) “RetSDR2” (SEQ ID No:21) or a functionally active derivative thereof, or a functionally active fragment thereof, or a homolog thereof, or a variant of “RetSDR2” encoded by a nucleic acid that hybridizes to the “RetSDR2” nucleic acid or its complement under low stringency conditions,

[1336] (xvi) “SFXN1” (SEQ ID No:24) or a functionally active derivative thereof, or a functionally active fragment thereof, or a homolog thereof, or a variant of “SFXN1” encoded by a nucleic acid that hybridizes to the “SFXN1” nucleic acid or its complement under low stringency conditions,

[1337] (xvii) “SPC18” (SEQ ID No:26) or a functionally active derivative thereof, or a functionally active fragment thereof, or a homolog thereof, or a variant of “SPC18” encoded by a nucleic acid that hybridizes to the “SPC18” nucleic acid or its complement under low stringency conditions,

[1338] (xviii) “SPC22” (SEQ ID No:27) or a functionally active derivative thereof, or a functionally active fragment thereof, or a homolog thereof, or a variant of “SPC22” encoded by a nucleic acid that hybridizes to the “SPC22” nucleic acid or its complement under low stringency conditions,

[1339] (xix) “SPC25” (SEQ ID No:28) or a functionally active derivative thereof, or a functionally active fragment thereof, or a homolog thereof, or a variant of “SPC25” encoded by a nucleic acid that hybridizes to the “SPC25” nucleic acid or its complement under low stringency conditions,

[1340] (xx) “SPTLC2” (SEQ ID No:117) or a functionally active derivative thereof, or a functionally active fragment thereof, or a homolog thereof, or a variant of “SPTLC2” encoded by a nucleic acid that hybridizes to the “SPTLC2” nucleic acid or its complement under low stringency conditions,

[1341] (xxi) “stearoyl-CoA desaturase” (SEQ ID No:29) or a functionally active derivative thereof, or a functionally active fragment thereof, or a homolog thereof, or a variant of “stearoyl-CoA desaturase” encoded by a nucleic acid that hybridizes to the “stearoyl-CoA desaturase” nucleic acid or its complement under low stringency conditions,

[1342] (xxii) “STT3” (SEQ ID No:61) or a functionally active derivative thereof, or a functionally active fragment thereof, or a homolog thereof, or a variant of “STT3” encoded by a nucleic acid that hybridizes to the “STT3” nucleic acid or its complement under low stringency conditions,

[1343] (xxiii) “TMP21” (SEQ ID No:30) or a functionally active derivative thereof, or a functionally active fragment thereof, or a homolog thereof, or a variant of “TMP21” encoded by a nucleic acid that hybridizes to the “TMP21” nucleic acid or its complement under low stringency conditions,

[1344] (xxiv) “UGCGL1” (SEQ ID No:45) or a functionally active derivative thereof, or a functionally active fragment thereof, or a homolog thereof, or a variant of “UGCGL1” encoded by a nucleic acid that hybridizes to the “UGCGL1” nucleic acid or its complement under low stringency conditions,

[1345] (xxv) “visinin-like 1” (SEQ ID No:37) or a functionally active derivative thereof, or a functionally active fragment thereof, or a homolog thereof, or a variant of “visinin-like 1” encoded by a nucleic acid that hybridizes to the “visinin-like 1” nucleic acid or its complement under low stringency conditions,

[1346] (xxvi) “Wolframin” (SEQ ID No:67) or a functionally active derivative thereof, or a functionally active fragment thereof, or a homolog thereof, or a variant of “Wolframin” encoded by a nucleic acid that hybridizes to the “Wolframin” nucleic acid or its complement under low stringency conditions,

[1347] (xxvii) “YME1L1” (SEQ ID No:32) or a functionally active derivative thereof, or a functionally active fragment thereof, or a homolog thereof, or a variant of “YME1L1” encoded by a nucleic acid that hybridizes to the “YME1L1” nucleic acid or its complement under low stringency conditions, and a complex (II) comprising at least two of said second proteins, wherein said low stringency conditions comprise hybridization in a buffer comprising 35% formamide, 5×SSC, 50 mM Tris-HCI (pH 7.5), 5 mM EDTA, 0.02% PVP, 0.02% Ficoll, 0.2% BSA, 100 ug/ml denatured salmon sperm DNA, and 10% (wt/vol) dextran sulfate for 18-20 hours at 40 Celsius, washing in a buffer consisting of 2×SSC, 25 mM Tris-HCI (pH 7.4), 5 mM EDTA, and 0.1% SDS for 1.5 hours at 55 Celsius, and washing in a buffer consisting of 2×SSC, 25 mM Tris-HCI (pH 7.4), 5 mM EDTA, and 0.1% SDS for 1.5 hours at 60 Celsius.

[1348] 2. The protein complex according to No. 1 wherein the first protein is the protein APP-C99 (SEQ ID No:120), or a functionally active derivative thereof, or a functionally active fragment thereof, or a homolog thereof, or a variant of ‘APP-C99’ encoded by a nucleic acid that hybridizes to the ‘APP-C99’ under low stringency conditions.

3. The protein complex according to No. 1-2 and comprising the following proteins:

[1349] (i) “APP-C99” (SEQ ID No:120) or a functionally active derivative thereof, or a functionally active fragment thereof, or a homolog thereof, or a variant of “APP-C99” encoded by a nucleic acid that hybridizes to the “APP-C99” nucleic acid or its complement under low stringency conditions,

[1350] (ii) “Nicastrin” (SEQ ID No:9) or a functionally active derivative thereof, or a functionally active fragment thereof, or a homolog thereof, or a variant of “Nicastrin” encoded by a nucleic acid that hybridizes to the “Nicastrin” nucleic acid or its complement under low stringency conditions,

[1351] (iii) “Psen1” (SEQ ID No:3) or a functionally active derivative thereof, or a functionally active fragment thereof, or a homolog thereof, or a variant of “Psen1” encoded by a nucleic acid that hybridizes to the “Psen1” nucleic acid or its complement under low stringency conditions,

[1352] (iv) “aph-1a” (SEQ ID No:1) or a functionally active derivative thereof, or a functionally active fragment thereof, or a homolog thereof, or a variant of “aph-1a” encoded by a nucleic acid that hybridizes to the “aph-1a” nucleic acid or its complement under low stringency conditions,

[1353] (v) “APP” (SEQ ID No:23) or a functionally active derivative thereof, or a functionally active fragment thereof, or a homolog thereof, or a variant of “APP” encoded by a nucleic acid that hybridizes to the “APP” nucleic acid or its complement under low stringency conditions,

[1354] (vi) “CtnnA1” (SEQ ID No:47) or a functionally active derivative thereof, or a functionally active fragment thereof, or a homolog thereof, or a variant of “CtnnA1” encoded by a nucleic acid that hybridizes to the “CtnnA1” nucleic acid or its complement under low stringency conditions,

[1355] (vii) “CtnnA2” (SEQ ID No:48) or a functionally active derivative thereof, or a functionally active fragment thereof, or a homolog thereof, or a variant of “CtnnA2” encoded by a nucleic acid that hybridizes to the “CtnnA2” nucleic acid or its complement under low stringency conditions,

[1356] (viii) “CtnnB1” (SEQ ID No:46) or a functionally active derivative thereof, or a functionally active fragment thereof, or a homolog thereof, or a variant of “CtnnB1” encoded by a nucleic acid that hybridizes to the “CtnnB1” nucleic acid or its complement under low stringency conditions,

[1357] (ix) “CtnnD1” (SEQ ID No:49) or a functionally active derivative thereof, or a functionally active fragment thereof, or a homolog thereof, or a variant of “CtnnD1” encoded by a nucleic acid that hybridizes to the “CtnnD1” nucleic acid or its complement under low stringency conditions,

[1358] (x) “JUP” (SEQ ID No:2) or a functionally active derivative thereof, or a functionally active fragment thereof, or a homolog thereof, or a variant of “JUP” encoded by a nucleic acid that hybridizes to the “JUP” nucleic acid or its complement under low stringency conditions,

[1359] (xi) “NCadh” (SEQ ID No:50) or a functionally active derivative thereof, or a functionally active fragment thereof, or a homolog thereof, or a variant of “NCadh” encoded by a nucleic acid that hybridizes to the “NCadh” nucleic acid or its complement under low stringency conditions,

[1360] (xii) “ACAT1” (SEQ ID No:4) or a functionally active derivative thereof, or a functionally active fragment thereof, or a homolog thereof, or a variant of “ACAT1” encoded by a nucleic acid that hybridizes to the “ACAT1” nucleic acid or its complement under low stringency conditions,

[1361] (xiii) “CGI-13” (SEQ ID No:72) or a functionally active derivative thereof, or a functionally active fragment thereof, or a homolog thereof, or a variant of “CGI-13” encoded by a nucleic acid that hybridizes to the “CGI-13” nucleic acid or its complement under low stringency conditions,

[1362] (xiv) “CK2B” (SEQ ID No:59) or a functionally active derivative thereof, or a functionally active fragment thereof, or a homolog thereof, or a variant of “CK2B” encoded by a nucleic acid that hybridizes to the “CK2B” nucleic acid or its complement under low stringency conditions,

[1363] (xv) “CLGN” (SEQ ID No:54) or a functionally active derivative thereof, or a functionally active fragment thereof, or a homolog thereof, or a variant of “CLGN” encoded by a nucleic acid that hybridizes to the “CLGN” nucleic acid or its complement under low stringency conditions,

[1364] (xvi) “ECSIT” (SEQ ID No:55) or a functionally active derivative thereof, or a functionally active fragment thereof, or a homolog thereof, or a variant of “ECSIT” encoded by a nucleic acid that hybridizes to the “ECSIT” nucleic acid or its complement under low stringency conditions,

[1365] (xvii) “FACL3” (SEQ ID No:11) or a functionally active derivative thereof, or a functionally active fragment thereof, or a homolog thereof, or a variant of “FACL3” encoded by a nucleic acid that hybridizes to the “FACL3” nucleic acid or its complement under low stringency conditions,

[1366] (xviii) “FADS2” (SEQ ID No:40) or a functionally active derivative thereof, or a functionally active fragment thereof, or a homolog thereof, or a variant of “FADS2” encoded by a nucleic acid that hybridizes to the “FADS2” nucleic acid or its complement under low stringency conditions,

[1367] (xix) “FLJ20481” (SEQ ID No:82) or a functionally active derivative thereof, or a functionally active fragment thereof, or a homolog thereof, or a variant of “FLJ20481” encoded by a nucleic acid that hybridizes to the “FLJ20481” nucleic acid or its complement under low stringency conditions,

[1368] (xx) “ITM2C” (SEQ ID No:13) or a functionally active derivative thereof, or a functionally active fragment thereof, or a homolog thereof, or a variant of “ITM2C” encoded by a nucleic acid that hybridizes to the “ITM2C” nucleic acid or its complement under low stringency conditions,

[1369] (xxi) “ITPR1” (SEQ ID No:16) or a functionally active derivative thereof, or a functionally active fragment thereof, or a homolog thereof, or a variant of “ITPR1” encoded by a nucleic acid that hybridizes to the “ITPR1” nucleic acid or its complement under low stringency conditions,

[1370] (xxii) “KIAA0363” (SEQ ID No:105) or a functionally active derivative thereof, or a functionally active fragment thereof, or a homolog thereof, or a variant of “KIAA0363” encoded by a nucleic acid that hybridizes to the “KIAA0363” nucleic acid or its complement under low stringency conditions,

[1371] (xxiii) “MDR1” (SEQ ID No:18) or a functionally active derivative thereof, or a functionally active fragment thereof, or a homolog thereof, or a variant of “MDR1” encoded by a nucleic acid that hybridizes to the “MDR1” nucleic acid or its complement under low stringency conditions,

[1372] (xxiv) “Neurotrypsin” (SEQ ID No:19) or a functionally active derivative thereof, or a functionally active fragment thereof, or a homolog thereof, or a variant of “Neurotrypsin” encoded by a nucleic acid that hybridizes to the “Neurotrypsin” nucleic acid or its complement under low stringency conditions,

[1373] (xxv) “PTP LOC114971” (SEQ ID No:60) or a functionally active derivative thereof, or a functionally active fragment thereof, or a homolog thereof, or a variant of “PTP LOC114971” encoded by a nucleic acid that hybridizes to the “PTP LOC114971” nucleic acid or its complement under low stringency conditions,

[1374] (xxvi) “RetSDR2” (SEQ ID No:21) or a functionally active derivative thereof, or a functionally active fragment thereof, or a homolog thereof, or a variant of “RetSDR2” encoded by a nucleic acid that hybridizes to the “RetSDR2” nucleic acid or its complement under low stringency conditions,

[1375] (xxvii) “SFXN1” (SEQ ID No:24) or a functionally active derivative thereof, or a functionally active fragment thereof, or a homolog thereof, or a variant of “SFXN1” encoded by a nucleic acid that hybridizes to the “SFXN1” nucleic acid or its complement under low stringency conditions,

[1376] (xxviii) “SPC18” (SEQ ID No:26) or a functionally active derivative thereof, or a functionally active fragment thereof, or a homolog thereof, or a variant of “SPC18” encoded by a nucleic acid that hybridizes to the “SPC18” nucleic acid or its complement under low stringency conditions,

[1377] (xxix) “SPC22” (SEQ ID No:27) or a functionally active derivative thereof, or a functionally active fragment thereof, or a homolog thereof, or a variant of “SPC22” encoded by a nucleic acid that hybridizes to the “SPC22” nucleic acid or its complement under low stringency conditions,

[1378] (xxx) “SPC25” (SEQ ID No:28) or a functionally active derivative thereof, or a functionally active fragment thereof, or a homolog thereof, or a variant of “SPC25” encoded by a nucleic acid that hybridizes to the “SPC25” nucleic acid or its complement under low stringency conditions,

[1379] (xxxi) “SPTLC2” (SEQ ID No:117) or a functionally active derivative thereof, or a functionally active fragment thereof, or a homolog thereof, or a variant of “SPTLC2” encoded by a nucleic acid that hybridizes to the “SPTLC2” nucleic acid or its complement under low stringency conditions,

[1380] (xxxii) “stearoyl-CoA desaturase” (SEQ ID No:29) or a functionally active derivative thereof, or a functionally active fragment thereof, or a homolog thereof, or a variant of “stearoyl-CoA desaturase” encoded by a nucleic acid that hybridizes to the “stearoyl-CoA desaturase” nucleic acid or its complement under low stringency conditions,

[1381] (xxxiii) “STT3” (SEQ ID No:61) or a functionally active derivative thereof, or a functionally active fragment thereof, or a homolog thereof, or a variant of “STT3” encoded by a nucleic acid that hybridizes to the “STT3” nucleic acid or its complement under low stringency conditions,

[1382] (xxxiv) “TMP21” (SEQ ID No:30) or a functionally active derivative thereof, or a functionally active fragment thereof, or a homolog thereof, or a variant of “TMP21” encoded by a nucleic acid that hybridizes to the “TMP21” nucleic acid or its complement under low stringency conditions,

[1383] (xxxv) “UGCGL1” (SEQ ID No:45) or a functionally active derivative thereof, or a functionally active fragment thereof, or a homolog thereof, or a variant of “UGCGL1” encoded by a nucleic acid that hybridizes to the “UGCGL1” nucleic acid or its complement under low stringency conditions,

[1384] (xxxvi) “visinin-like 1” (SEQ ID No:37) or a functionally active derivative thereof, or a functionally active fragment thereof, or a homolog thereof, or a variant of “visinin-like 1” encoded by a nucleic acid that hybridizes to the “visinin-like 1” nucleic acid or its complement under low stringency conditions,

[1385] (xxxvii) “Wolframin” (SEQ ID No:67) or a functionally active derivative thereof, or a functionally active fragment thereof, or a homolog thereof, or a variant of “Wolframin” encoded by a nucleic acid that hybridizes to the “Wolframin” nucleic acid or its complement under low stringency conditions,

[1386] (xxxviii) “YME1L1” (SEQ ID No:32) or a functionally active derivative thereof, or a functionally active fragment thereof, or a homolog thereof, or a variant of “YME1L1” encoded by a nucleic acid that hybridizes to the “YME1L1” nucleic acid or its complement under low stringency conditions.

4. The protein complex according to No. 1 comprising all but 1-27 of the following proteins:

[1387] (i) “APP-C99” (SEQ ID No:120) or a functionally active derivative thereof, or a functionally active fragment thereof, or a homolog thereof, or a variant of “APP-C99” encoded by a nucleic acid that hybridizes to the “APP-C99” nucleic acid or its complement under low stringency conditions,

[1388] (ii) “Nicastrin” (SEQ ID No:9) or a functionally active derivative thereof, or a functionally active fragment thereof, or a homolog thereof, or a variant of “Nicastrin” encoded by a nucleic acid that hybridizes to the “Nicastrin” nucleic acid or its complement under low stringency conditions,

[1389] (iii) “Psen1” (SEQ ID No:3) or a functionally active derivative thereof, or a functionally active fragment thereof; or a homolog thereof, or a variant of “Psen1” encoded by a nucleic acid that hybridizes to the “Psen1” nucleic acid or its complement under low stringency conditions,

[1390] (iv) “aph-1a” (SEQ ID No:1) or a functionally active derivative thereof, or a functionally active fragment thereof, or a homolog thereof, or a variant of “aph-1a” encoded by a nucleic acid that hybridizes to the “aph-1a” nucleic acid or its complement under low stringency conditions,

[1391] (v) “APP” (SEQ ID No:23) or a functionally active derivative thereof, or a functionally active fragment thereof, or a homolog thereof, or a variant of “APP” encoded by a nucleic acid that hybridizes to the “APP” nucleic acid or its complement under low stringency conditions,

[1392] (vi) “CtnnA1” (SEQ ID No:47) or a functionally active derivative thereof, or a functionally active fragment thereof, or a homolog thereof, or a variant of “CtnnA1” encoded by a nucleic acid that hybridizes to the “CtnnA1” nucleic acid or its complement under low stringency conditions,

[1393] (vii) “CtnnA2” (SEQ ID No:48) or a functionally active derivative thereof, or a functionally active fragment thereof, or a homolog thereof, or a variant of “CtnnA2” encoded by a nucleic acid that hybridizes to the “CtnnA2” nucleic acid or its complement under low stringency conditions,

[1394] (viii) “CtnnB1” (SEQ ID No:46) or a functionally active derivative thereof, or a functionally active fragment thereof, or a homolog thereof, or a variant of “CtnnB1” encoded by a nucleic acid that hybridizes to the “CtnnB1” nucleic acid or its complement under low stringency conditions,

[1395] (ix) “CtnnD1” (SEQ ID No:49) or a functionally active derivative thereof, or a functionally active fragment thereof, or a homolog thereof, or a variant of “CtnnD1” encoded by a nucleic acid that hybridizes to the “CtnnD1” nucleic acid or its complement under low stringency conditions,

[1396] (x) “JUP” (SEQ ID No:2) or a functionally active derivative thereof, or a functionally active fragment thereof, or a homolog thereof, or a variant of “JUP” encoded by a nucleic acid that hybridizes to the “JUP” nucleic acid or its complement under low stringency conditions,

[1397] (xi) “NCadh” (SEQ ID No:50) or a functionally active derivative thereof, or a functionally active fragment thereof, or a homolog thereof, or a variant of “NCadh” encoded by a nucleic acid that hybridizes to the “NCadh” nucleic acid or its complement under low stringency conditions,

[1398] (xii) “ACAT1” (SEQ ID No:4) or a functionally active derivative thereof, or a functionally active fragment thereof, or a homolog thereof, or a variant of “ACAT1” encoded by a nucleic acid that hybridizes to the “ACAT1” nucleic acid or its complement under low stringency conditions,

[1399] (xiii) “CGI-13” (SEQ ID No:72) or a functionally active derivative thereof, or a functionally active fragment thereof, or a homolog thereof, or a variant of “CGI-13” encoded by a nucleic acid that hybridizes to the “CGI-13” nucleic acid or its complement under low stringency conditions,

[1400] (xiv) “CK2B” (SEQ ID No:59) or a functionally active derivative thereof, or a functionally active fragment thereof, or a homolog thereof, or a variant of “CK2B” encoded by a nucleic acid that hybridizes to the “CK2B” nucleic acid or its complement under low stringency conditions,

[1401] (xv) “CLGN” (SEQ ID No:54) or a functionally active derivative thereof, or a functionally active fragment thereof, or a homolog thereof, or a variant of “CLGN” encoded by a nucleic acid that hybridizes to the “CLGN” nucleic acid or its complement under low stringency conditions,

[1402] (xvi) “ECSIT” (SEQ ID No:55) or a functionally active derivative thereof, or a functionally active fragment thereof, or a homolog thereof, or a variant of “ECSIT” encoded by a nucleic acid that hybridizes to the “ECSIT” nucleic acid or its complement under low stringency conditions,

[1403] (xvii) “FACL3” (SEQ ID No:11) or a functionally active derivative thereof, or a functionally active fragment thereof, or a homolog thereof, or a variant of “FACL3” encoded by a nucleic acid that hybridizes to the “FACL3” nucleic acid or its complement under low stringency conditions,

[1404] (xviii) “FADS2” (SEQ ID No:40) or a functionally active derivative thereof, or a functionally active fragment thereof, or a homolog thereof, or a variant of “FADS2” encoded by a nucleic acid that hybridizes to the “FADS2” nucleic acid or its complement under low stringency conditions,

[1405] (xix) “FLJ20481” (SEQ ID No:82) or a functionally active derivative thereof, or a functionally active fragment thereof, or a homolog thereof, or a variant of “FLJ20481” encoded by a nucleic acid that hybridizes to the “FLJ20481” nucleic acid or its complement under low stringency conditions,

[1406] (xx) “ITM2C” (SEQ ID No:13) or a functionally active derivative thereof, or a functionally active fragment thereof, or a homolog thereof, or a variant of “ITM2C” encoded by a nucleic acid that hybridizes to the “ITM2C” nucleic acid or its complement under low stringency conditions,

[1407] (xxi) “ITPR1” (SEQ ID No:16) or a functionally active derivative thereof, or a functionally active fragment thereof, or a homolog thereof, or a variant of “ITPR1” encoded by a nucleic acid that hybridizes to the “ITPR1” nucleic acid or its complement under low stringency conditions,

[1408] (xxii) “KIAA0363” (SEQ ID No:105) or a functionally active derivative thereof, or a functionally active fragment thereof, or a homolog thereof, or a variant of “KIAA0363” encoded by a nucleic acid that hybridizes to the “KIAA0363” nucleic acid or its complement under low stringency conditions,

[1409] (xxiii) “MDR1” (SEQ ID No:18) or a functionally active derivative thereof, or a functionally active fragment thereof, or a homolog thereof, or a variant of “MDR1” encoded by a nucleic acid that hybridizes to the “MDR1” nucleic acid or its complement under low stringency conditions,

[1410] (xxiv) “Neurotrypsin” (SEQ ID No:19) or a functionally active derivative thereof, or a functionally active fragment thereof, or a homolog thereof, or a variant of “Neurotrypsin” encoded by a nucleic acid that hybridizes to the “Neurotrypsin” nucleic acid or its complement under low stringency conditions,

[1411] (xxv) “PTP LOC114971” (SEQ ID No:60) or a functionally active derivative thereof, or a functionally active fragment thereof, or a homolog thereof, or a variant of “PTP LOC114971” encoded by a nucleic acid that hybridizes to the “PTP LOC114971” nucleic acid or its complement under low stringency conditions,

[1412] (xxvi) “RetSDR2” (SEQ ID No:21) or a functionally active derivative thereof, or a functionally active fragment thereof, or a homolog thereof, or a variant of “RetSDR2” encoded by a nucleic acid that hybridizes to the “RetSDR2” nucleic acid or its complement under low stringency conditions,

[1413] (xxvii) “SFXN1” (SEQ ID No:24) or a functionally active derivative thereof, or a functionally active fragment thereof, or a homolog thereof, or a variant of “SFXN1” encoded by a nucleic acid that hybridizes to the “SFXN1” nucleic acid or its complement under low stringency conditions,

[1414] (xxviii) “SPC18” (SEQ ID No:26) or a functionally active derivative thereof, or a functionally active fragment thereof, or a homolog thereof, or a variant of “SPC18” encoded by a nucleic acid that hybridizes to the “SPC18” nucleic acid or its complement under low stringency conditions,

[1415] (xxix) “SPC22” (SEQ ID No:27) or a functionally active derivative thereof, or a functionally active fragment thereof, or a homolog thereof, or a variant of “SPC22” encoded by a nucleic acid that hybridizes to the “SPC22” nucleic acid or its complement under low stringency conditions,

[1416] (xxx) “SPC25” (SEQ ID No:28) or a functionally active derivative thereof, or a functionally active fragment thereof, or a homolog thereof, or a variant of “SPC25” encoded by a nucleic acid that hybridizes to the “SPC25” nucleic acid or its complement under low stringency conditions,

[1417] (xxxi) “SPTLC2” (SEQ ID No:117) or a functionally active derivative thereof, or a functionally active fragment thereof, or a homolog thereof, or a variant of “SPTLC2” encoded by a nucleic acid that hybridizes to the “SPTLC2” nucleic acid or its complement under low stringency conditions,

[1418] (xxxii) “stearoyl-CoA desaturase” (SEQ ID No:29) or a functionally active derivative thereof, or a functionally active fragment thereof, or a homolog thereof, or a variant of “stearoyl-CoA desaturase” encoded by a nucleic acid that hybridizes to the “stearoyl-CoA desaturase” nucleic acid or its complement under low stringency conditions,

[1419] (xxxiii) “STT3” (SEQ ID No:61) or a functionally active derivative thereof, or a functionally active fragment thereof, or a homolog thereof, or a variant of “STT3” encoded by a nucleic acid that hybridizes to the “STT3” nucleic acid or its complement under low stringency conditions,

[1420] (xxxiv) “TMP21” (SEQ ID No:30) or a functionally active derivative thereof, or a functionally active fragment thereof, or a homolog thereof, or a variant of “TMP21” encoded by a nucleic acid that hybridizes to the “TMP21” nucleic acid or its complement under low stringency conditions,

[1421] (xxxv) “UGCGL1” (SEQ ID No:45) or a functionally active derivative thereof, or a functionally active fragment thereof, or a homolog thereof, or a variant of “UGCGL1” encoded by a nucleic acid that hybridizes to the “UGCGL1” nucleic acid or its complement under low stringency conditions,

[1422] (xxxvi) “visinin-like 1” (SEQ ID No:37) or a functionally active derivative thereof, or a functionally active fragment thereof, or a homolog thereof, or a variant of “visinin-like 1” encoded by a nucleic acid that hybridizes to the “visinin-like 1” nucleic acid or its complement under low stringency conditions,

[1423] (xxxvii) “Wolframin” (SEQ ID No:67) or a functionally active derivative thereof, or a functionally active fragment thereof, or a homolog thereof, or a variant of “Wolframin” encoded by a nucleic acid that hybridizes to the “Wolframin” nucleic acid or its complement under low stringency conditions,

[1424] (xxxviii) “YME1L1” (SEQ ID No:32) or a functionally active derivative thereof, or a functionally active fragment thereof, or a homolog thereof, or a variant of “YME1L1” encoded by a nucleic acid that hybridizes to the “YME1L1” nucleic acid or its complement under low stringency conditions.

[1425] 5. The complex of any of No. 1-4 comprising a functionally active derivative of said first protein and/or a functionally active derivative of said second protein, wherein the functionally active derivative is a fusion protein comprising said first protein or said second protein fused to an amino acid sequence different from the first protein or second protein, respectively.

6. The complex of No. 5 wherein the functionally active derivative is a fusion protein comprising said first protein or said second protein fused to an affinity tag or label.

7. The complex of any of No. 1-4 comprising a fragment of said first protein and/or a fragment of said second protein, which fragment binds to another protein component of said complex.

[1426] 8. The complex of any of No. 1-7 that is involved in the transactivation of a Gal4-driven reporter gene (e.g. by modifying the expression of one or several interacting proteins in cells by means of RNAi (siRNA) and/or plasmids encoding the interacting protein(s)), the production of Abeta-40 and Abeta-42 peptides by ELISA (e.g. by modifying the expression of one or several interacting proteins in cells by means of RNAi (siRNA) and/or plasmids encoding the interacting protein(s)), the production of C-terminal APP fragments in cell lines or transgenic animals by western blot (e.g. by modifying the expression of one or several interacting proteins in cells by means of RNAi (siRNA) and/or plasmids encoding the interacting protein(s)) or the proteolytic activity of beta- or gamma secretases towards bacterially expressed APP fragments in vitro (e.g. by modifying the expression of one or several interacting proteins in cells by means of RNAi (siRNA) and/or plasmids encoding the interacting protein(s)).

[1427] 9. A process for preparing a complex of any of No. 1-8 and optionally the components thereof comprising the following steps: expressing a protein (bait) of the complex, preferably a tagged protein, in a target cell, isolating the protein complex which is attached to the bait protein, and optionally dissociating the protein complex and isolating the individual complex members.

10. The process according to No. 9 wherein the tagged protein comprises two different tags which allow two separate affinity purification steps.

11. The process according to any of No. 9-10 wherein the two tags are separated by a cleavage site for a protease.

12. Component of the Fe65 complex obtainable by a process according to any of No. 9-11.

[1428] 13. Construct, preferably a vector construct, comprising at least two separate nucleic acid sequences each encoding a different protein, or a functionally active fragment or a functionally active derivative of at least one of said proteins, or functionally active fragments or functionally active derivative thereof being selected from the first group of proteins according to No. 1 (a) and at least one of said proteins, or functionally active fragments or functionally active derivative thereof being selected from the second group of proteins according to No. 1 (b).

[1429] 14. Host cell, containing a construct of No. 13 or containing several vectors each comprising at least the nucleic acid sequence encoding at least one of the proteins, or functionally active fragments or functionally active derivatives thereof selected from the first group of proteins according to No. 1 (a) and the proteins, or functionally active fragments or functionally active derivatives thereof selected from the second group of proteins according to No. 1 (b).

[1430] 15. An antibody or a fragment of said antibody containing the binding domain thereof, selected from an antibody or fragment thereof, which binds the complex of any of No. 1-8 and which does not bind any of the proteins of said complex when uncomplexed.

16. A kit comprising in one or more container the complex of any of No. 1-8 optionally together with an antibody according to No. 15 and/or further components such as reagents and working instructions.

17. The kit according to No. 16 for processing a substrate of said complex.

18. The kit according to No. 16 for the diagnosis or prognosis of a disease or a disease risk, preferentially for a disease or disorder such as neurodegenerative disease such as Alzheimer's disease.

19. Array, in which at least a complex according to any of No. 1-8 and/or at least one antibody according to No. 15 is attached to a solid carrier.

20. A process for processing a physiological substrate of the complex comprising the step of bringing into contact a complex to any of No. 1-8 with said substrate, such that said substrate is processed.

21. A pharmaceutical composition comprising the protein complex of any of No. 1-8 and/or any of the following the proteins:

[1431] (i) “APP-C99” (SEQ ID No:120) or a functionally active derivative thereof, or a functionally active fragment thereof, or a homolog thereof, or a variant of “APP-C99” encoded by a nucleic acid that hybridizes to the “APP-C99” nucleic acid or its complement under low stringency conditions,

[1432] (ii) “Nicastrin” (SEQ ID No:9) or a functionally active derivative thereof, or a functionally active fragment thereof, or a homolog thereof, or a variant of “Nicastrin” encoded by a nucleic acid that hybridizes to the “Nicastrin” nucleic acid or its complement under low stringency conditions,

[1433] (iii) “Psen1” (SEQ ID No:3) or a functionally active derivative thereof, or a functionally active fragment thereof, or a homolog thereof, or a variant of “Psen1” encoded by a nucleic acid that hybridizes to the “Psen1” nucleic acid or its complement under low stringency conditions,

[1434] (iv) “aph-1a” (SEQ ID No:1) or a functionally active derivative thereof, or a functionally active fragment thereof, or a homolog thereof, or a variant of “aph-1a” encoded by a nucleic acid that hybridizes to the “aph-1a” nucleic acid or its complement under low stringency conditions,

[1435] (v) “APP” (SEQ ID No:23) or a functionally active derivative thereof, or a functionally active fragment thereof, or a homolog thereof, or a variant of “APP” encoded by a nucleic acid that hybridizes to the “APP” nucleic acid or its complement under low stringency conditions,

[1436] (vi) “CtnnA1” (SEQ ID No:47) or a functionally active derivative thereof, or a functionally active fragment thereof, or a homolog thereof, or a variant of “CtnnA1” encoded by a nucleic acid that hybridizes to the “CtnnA1” nucleic acid or its complement under low stringency conditions,

[1437] (vii) “CtnnA2” (SEQ ID No:48) or a functionally active derivative thereof, or a functionally active fragment thereof, or a homolog thereof, or a variant of “CtnnA2” encoded by a nucleic acid that hybridizes to the “CtnnA2” nucleic acid or its complement under low stringency conditions,

[1438] (viii) “CtnnB1” (SEQ ID No:46) or a functionally active derivative thereof, or a functionally active fragment thereof, or a homolog thereof, or a variant of “CtnnB1” encoded by a nucleic acid that hybridizes to the “CtnnB1” nucleic acid or its complement under low stringency conditions,

[1439] (ix) “CtnnD1” (SEQ ID No:49) or a functionally active derivative thereof, or a functionally active fragment thereof, or a homolog thereof, or a variant of “CtnnD1” encoded by a nucleic acid that hybridizes to the “CtnnD1” nucleic acid or its complement under low stringency conditions,

[1440] (x) “JUP” (SEQ ID No:2) or a functionally active derivative thereof, or a functionally active fragment thereof, or a homolog thereof, or a variant of “JUP” encoded by a nucleic acid that hybridizes to the “JUP” nucleic acid or its complement under low stringency conditions,

[1441] (xi) “NCadh” (SEQ ID No:50) or a functionally active derivative thereof, or a functionally active fragment thereof, or a homolog thereof, or a variant of “NCadh” encoded by a nucleic acid that hybridizes to the “NCadh” nucleic acid or its complement under low stringency conditions,

[1442] (xii) “ACAT1” (SEQ ID No:4) or a functionally active derivative thereof, or a functionally active fragment thereof, or a homolog thereof, or a variant of “ACAT1” encoded by a nucleic acid that hybridizes to the “ACAT1” nucleic acid or its complement under low stringency conditions,

[1443] (xiii) “CGI-13” (SEQ ID No:72) or a functionally active derivative thereof, or a functionally active fragment thereof, or a homolog thereof, or a variant of “CGI-13” encoded by a nucleic acid that hybridizes to the “CGI-13” nucleic acid or its complement under low stringency conditions,

[1444] (xiv) “CK2B” (SEQ ID No:59) or a functionally active derivative thereof, or a functionally active fragment thereof, or a homolog thereof, or a variant of “CK2B” encoded by a nucleic acid that hybridizes to the “CK2B” nucleic acid or its complement under low stringency conditions,

[1445] (xv) “CLGN” (SEQ ID No:54) or a functionally active derivative thereof, or a functionally active fragment thereof, or a homolog thereof, or a variant of “CLGN” encoded by a nucleic acid that hybridizes to the “CLGN” nucleic acid or its complement under low stringency conditions,

[1446] (xvi) “ECSIT” (SEQ ID No:55) or a functionally active derivative thereof, or a functionally active fragment thereof, or a homolog thereof, or a variant of “ECSIT” encoded by a nucleic acid that hybridizes to the “ECSIT” nucleic acid or its complement under low stringency conditions,

[1447] (xvii) “FACL3” (SEQ ID No:11) or a functionally active derivative thereof, or a functionally active fragment thereof, or a homolog thereof, or a variant of “FACL3” encoded by a nucleic acid that hybridizes to the “FACL3” nucleic acid or its complement under low stringency conditions,

[1448] (xviii) “FADS2” (SEQ ID No:40) or a functionally active derivative thereof, or a functionally active fragment thereof, or a homolog thereof, or a variant of “FADS2” encoded by a nucleic acid that hybridizes to the “FADS2” nucleic acid or its complement under low stringency conditions,

[1449] (xix) “FLJ20481” (SEQ ID No:82) or a functionally active derivative thereof, or a functionally active fragment thereof, or a homolog thereof, or a variant of “FLJ20481” encoded by a nucleic acid that hybridizes to the “FLJ20481” nucleic acid or its complement under low stringency conditions,

[1450] (xx) “ITM2C” (SEQ ID No:13) or a functionally active derivative thereof, or a functionally active fragment thereof, or a homolog thereof, or a variant of “ITM2C” encoded by a nucleic acid that hybridizes to the “ITM2C” nucleic acid or its complement under low stringency conditions,

[1451] (xxi) “ITPR1” (SEQ ID No:16) or a functionally active derivative thereof, or a functionally active fragment thereof, or a homolog thereof, or a variant of “ITPR1” encoded by a nucleic acid that hybridizes to the “ITPR1” nucleic acid or its complement under low stringency conditions,

[1452] (xxii) “KIAA0363” (SEQ ID No:105) or a functionally active derivative thereof, or a functionally active fragment thereof, or a homolog thereof, or a variant of “KIAA0363” encoded by a nucleic acid that hybridizes to the “KIAA0363” nucleic acid or its complement under low stringency conditions,

[1453] (xxiii) “MDR1” (SEQ ID No:18) or a functionally active derivative thereof, or a functionally active fragment thereof, or a homolog thereof, or a variant of “MDR1” encoded by a nucleic acid that hybridizes to the “MDR1” nucleic acid or its complement under low stringency conditions,

[1454] (xxiv) “Neurotrypsin” (SEQ ID No:19) or a functionally active derivative thereof, or a functionally active fragment thereof, or a homolog thereof, or a variant of “Neurotrypsin” encoded by a nucleic acid that hybridizes to the “Neurotrypsin” nucleic acid or its complement under low stringency conditions,

[1455] (xxv) “PTP LOC114971” (SEQ ID No:60) or a functionally active derivative thereof, or a functionally active fragment thereof, or a homolog thereof, or a variant of “PTP LOC114971” encoded by a nucleic acid that hybridizes to the “PTP LOC114971” nucleic acid or its complement under low stringency conditions,

[1456] (xxvi) “RetSDR2” (SEQ ID No:21) or a functionally active derivative thereof, or a functionally active fragment thereof, or a homolog thereof, or a variant of “RetSDR2” encoded by a nucleic acid that hybridizes to the “RetSDR2” nucleic acid or its complement under low stringency conditions,

[1457] (xxvii) “SFXN1” (SEQ ID No:24) or a functionally active derivative thereof, or a functionally active fragment thereof, or a homolog thereof, or a variant of “SFXN1” encoded by a nucleic acid that hybridizes to the “SFXN1” nucleic acid or its complement under low stringency conditions,

[1458] (xxviii) “SPC18” (SEQ ID No:26) or a functionally active derivative thereof, or a functionally active fragment thereof, or a homolog thereof, or a variant of “SPC18” encoded by a nucleic acid that hybridizes to the “SPC18” nucleic acid or its complement under low stringency conditions,

[1459] (xxix) “SPC22” (SEQ ID No:27) or a functionally active derivative thereof, or a functionally active fragment thereof, or a homolog thereof, or a variant of “SPC22” encoded by a nucleic acid that hybridizes to the “SPC22” nucleic acid or its complement under low stringency conditions,

[1460] (xxx) “SPC25” (SEQ ID No:28) or a functionally active derivative thereof, or a functionally active fragment thereof, or a homolog thereof, or a variant of “SPC25” encoded by a nucleic acid that hybridizes to the “SPC25” nucleic acid or its complement under low stringency conditions,

[1461] (xxxi) “SPTLC2” (SEQ ID No:117) or a functionally active derivative thereof, or a functionally active fragment thereof, or a homolog thereof, or a variant of “SPTLC2” encoded by a nucleic acid that hybridizes to the “SPTLC2” nucleic acid or its complement under low stringency conditions,

[1462] (xxxii) “stearoyl-CoA desaturase” (SEQ ID No:29) or a functionally active derivative thereof, or a functionally active fragment thereof, or a homolog thereof, or a variant of “stearoyl-CoA desaturase” encoded by a nucleic acid that hybridizes to the “stearoyl-CoA desaturase” nucleic acid or its complement under low stringency conditions,

[1463] (xxxiii) “STT3” (SEQ ID No:61) or a functionally active derivative thereof, or a functionally active fragment thereof, or a homolog thereof, or a variant of “STT3” encoded by a nucleic acid that hybridizes to the “STT3” nucleic acid or its complement under low stringency conditions,

[1464] (xxxiv) “TMP21” (SEQ ID No:30) or a functionally active derivative thereof, or a functionally active fragment thereof, or a homolog thereof, or a variant of “TMP21” encoded by a nucleic acid that hybridizes to the “TMP21” nucleic acid or its complement under low stringency conditions,

[1465] (xxxv) “UGCGL1” (SEQ ID No:45) or a functionally active derivative thereof, or a functionally active fragment thereof, or a homolog thereof, or a variant of “UGCGL1” encoded by a nucleic acid that hybridizes to the “UGCGL1” nucleic acid or its complement under low stringency conditions,

[1466] (xxxvi) “visinin-like 1” (SEQ ID No:37) or a functionally active derivative thereof, or a functionally active fragment thereof, or a homolog thereof, or a variant of “visinin-like 1” encoded by a nucleic acid that hybridizes to the “visinin-like 1” nucleic acid or its complement under low stringency conditions,

[1467] (xxxvii) “Wolframin” (SEQ ID No:67) or a functionally active derivative thereof, or a functionally active fragment thereof, or a homolog thereof, or a variant of “Wolframin” encoded by a nucleic acid that hybridizes to the “Wolframin” nucleic acid or its complement under low stringency conditions,

[1468] (xxxviii) “YME1L1” (SEQ ID No:32) or a functionally active derivative thereof, or a functionally active fragment thereof, or a homolog thereof, or a variant of “YME1L1” encoded by a nucleic acid that hybridizes to the “YME1L1” nucleic acid or its complement under low stringency conditions., and a pharmaceutical acceptable carrier.

22. A pharmaceutical composition according to No. 21 for the treatment of diseases and disorders such as neurodegenerative disease such as Alzheimer's disease.

[1469] 23. A method for screening for a molecule that modulates directly or indirectly the function, activity, composition or formation of the complex of any one of No. 1-8 comprising the steps of: (a) exposing said complex, or a cell or organism containing Nicastrin-complex to one or more candidate molecules; and

[1470] (b) determining the amount of activity of protein components of, and/or intracellular localization of, said complex and/or the transcription level of a gene dependent on the complex and/or the abundance and/or activity of a protein or protein complex dependent on the function of the complex and/or product of a gene dependent on the complex in the presence of the one or more candidate molecules, wherein a change in said amount, activity, protein components or intracellular localization relative to said amount, activity, protein components and/or intracellular localization and/or a change in the transcription level of a gene dependent on the complex and/or the abundance and/or activity of a protein or protein complex dependent on the function of the complex and/or product of a gene dependent on the complex in the absence of said candidate molecules indicates that the molecule modulates function, activity or composition of said complex.

24. The method of No. 23, wherein the amount of said complex is determined.

25. The method of No. 23 wherein the activity of said complex is determined.

[1471] 26. The method of No. 25 wherein said determining step comprises isolating from the cell or organism said complex to produce said isolated complex and contacting said isolated complex in the presence or absence of a candidate molecule with a substrate of said complex and determining the processing of said substrate is modified in the presence of said candidate molecule.

27. The method of No. 24 wherein the amount of the individual protein components of said complex are determined.

28. The method of No. 27 wherein said determining step comprises determining whether

[1472] (i) “APP-C99” (SEQ ID No:120) or a functionally active derivative thereof, or a functionally active fragment thereof, or a homolog thereof, or a variant of “APP-C99” encoded by a nucleic acid that hybridizes to the “APP-C99” nucleic acid or its complement under low stringency conditions, and/or

[1473] (ii) “Nicastrin” (SEQ ID No:9) or a functionally active derivative thereof, or a functionally active fragment thereof, or a homolog thereof, or a variant of “Nicastrin” encoded by a nucleic acid that hybridizes to the “Nicastrin” nucleic acid or its complement under low stringency conditions, and/or

[1474] (iii) “Psen1” (SEQ ID No:3) or a functionally active derivative thereof, or a functionally active fragment thereof, or a homolog thereof, or a variant of “Psen1” encoded by a nucleic acid that hybridizes to the “Psen1” nucleic acid or its complement under low stringency conditions, and/or

[1475] (iv) “aph-1a” (SEQ ID No:1) or a functionally active derivative thereof, or a functionally active fragment thereof, or a homolog thereof, or a variant of “aph-1a” encoded by a nucleic acid that hybridizes to the “aph-1a” nucleic acid or its complement under low stringency conditions, and/or

[1476] (v) “APP” (SEQ ID No:23) or a functionally active derivative thereof, or a functionally active fragment thereof, or a homolog thereof, or a variant of “APP” encoded by a nucleic acid that hybridizes to the “APP” nucleic acid or its complement under low stringency conditions, and/or

[1477] (vi) “CtnnA1” (SEQ ID No:47) or a functionally active derivative thereof, or a functionally active fragment thereof, or a homolog thereof, or a variant of “CtnnA1” encoded by a nucleic acid that hybridizes to the “CtnnA1” nucleic acid or its complement under low stringency conditions, and/or

[1478] (vii) “CtnnA2” (SEQ ID No:48) or a functionally active derivative thereof, or a functionally active fragment thereof, or a homolog thereof, or a variant of “CtnnA2” encoded by a nucleic acid that hybridizes to the “CtnnA2” nucleic acid or its complement under low stringency conditions, and/or

[1479] (viii) “CtnnB1” (SEQ ID No:46) or a functionally active derivative thereof, or a functionally active fragment thereof, or a homolog thereof, or a variant of “CtnnB1” encoded by a nucleic acid that hybridizes to the “CtnnB1” nucleic acid or its complement under low stringency conditions, and/or

[1480] (ix) “CtnnD1” (SEQ ID No:49) or a functionally active derivative thereof, or a functionally active fragment thereof, or a homolog thereof, or a variant of “CtnnD1” encoded by a nucleic acid that hybridizes to the “CtnnD1” nucleic acid or its complement under low stringency conditions, and/or

[1481] (x) “JUP” (SEQ ID No:2) or a functionally active derivative thereof, or a functionally active fragment thereof, or a homolog thereof, or a variant of “JUP” encoded by a nucleic acid that hybridizes to the “JUP” nucleic acid or its complement under low stringency conditions, and/or

[1482] (xi) “NCadh” (SEQ ID No:50) or a functionally active derivative thereof, or a functionally active fragment thereof, or a homolog thereof, or a variant of “NCadh” encoded by a nucleic acid that hybridizes to the “NCadh” nucleic acid or its complement under low stringency conditions, and/or

[1483] (xii) “ACAT1” (SEQ ID No:4) or a functionally active derivative thereof, or a functionally active fragment thereof, or a homolog thereof, or a variant of “ACAT1” encoded by a nucleic acid that hybridizes to the “ACAT1” nucleic acid or its complement under low stringency conditions, and/or

[1484] (xiii) “CGI-13” (SEQ ID No:72) or a functionally active derivative thereof, or a functionally active fragment thereof, or a homolog thereof, or a variant of “CGI-13” encoded by a nucleic acid that hybridizes to the “CGI-13” nucleic acid or its complement under low stringency conditions, and/or

[1485] (xiv) “CK2B” (SEQ ID No:59) or a functionally active derivative thereof, or a functionally active fragment thereof, or a homolog thereof, or a variant of “CK2B” encoded, by a nucleic acid that hybridizes to the “CK2B” nucleic acid or its complement under low stringency conditions, and/or

[1486] (xv) “CLGN” (SEQ ID No:54) or a functionally active derivative thereof, or a functionally active fragment thereof, or a homolog thereof, or a variant of “CLGN” encoded by a nucleic acid that hybridizes to the “CLGN” nucleic acid or its complement under low stringency conditions, and/or

[1487] (xvi) “ECSIT” (SEQ ID No:55) or a functionally active derivative thereof, or a functionally active fragment thereof, or a homolog thereof, or a variant of “ECSIT” encoded by a nucleic acid that hybridizes to the “ECSIT” nucleic acid or its complement under low stringency conditions, and/or

[1488] (xvii) “FACL3” (SEQ ID No:11) or a functionally active derivative thereof, or a functionally active fragment thereof, or a homolog thereof, or a variant of “FACL3” encoded by a nucleic acid that hybridizes to the “FACL3” nucleic acid or its complement under low stringency conditions, and/or

[1489] (xviii) “FADS2” (SEQ ID No:40) or a functionally active derivative thereof, or a functionally active fragment thereof, or a homolog thereof, or a variant of “FADS2” encoded by a nucleic acid that hybridizes to the “FADS2” nucleic acid or its complement under low stringency conditions, and/or

[1490] (xix) “FLJ20481” (SEQ ID No:82) or a functionally active derivative thereof, or a functionally active fragment thereof, or a homolog thereof, or a variant of “FLJ20481” encoded by a nucleic acid that hybridizes to the “FLJ20481” nucleic acid or its complement under low stringency conditions, and/or

[1491] (xx) “ITM2C” (SEQ ID No:13) or a functionally active derivative thereof, or a functionally active fragment thereof, or a homolog thereof, or a variant of “ITM2C” encoded by a nucleic acid that hybridizes to the “ITM2C” nucleic acid or its complement under low stringency conditions, and/or

[1492] (xxi) “ITPR1” (SEQ ID No:16) or a functionally active derivative thereof, or a functionally active fragment thereof, or a homolog thereof, or a variant of “ITPR1” encoded by a nucleic acid that hybridizes to the “ITPR1” nucleic acid or its complement under low stringency conditions, and/or

[1493] (xxii) “KIAA0363” (SEQ ID No:105) or a functionally active derivative thereof, or a functionally active fragment thereof, or a homolog thereof, or a variant of “KIAA0363” encoded by a nucleic acid that hybridizes to the “KIAA0363” nucleic acid or its complement under low stringency conditions, and/or

[1494] (xxiii) “MDR1” (SEQ ID No:18) or a functionally active derivative thereof, or a functionally active fragment thereof, or a homolog thereof, or a variant of “MDR1” encoded by a nucleic acid that hybridizes to the “MDR1” nucleic acid or its complement under low stringency conditions, and/or

[1495] (xxiv) “Neurotrypsin” (SEQ ID No:19) or a functionally active derivative thereof, or a functionally active fragment thereof, or a homolog thereof, or a variant of “Neurotrypsin” encoded by a nucleic acid that hybridizes to the “Neurotrypsin” nucleic acid or its complement under low stringency conditions, and/or

[1496] (xxv) “PTP LOC114971” (SEQ ID No:60) or a functionally active derivative thereof, or a functionally active fragment thereof, or a homolog thereof, or a variant of “PTP LOC114971” encoded by a nucleic acid that hybridizes to the “PTP LOC114971” nucleic acid or its complement under low stringency conditions, and/or

[1497] (xxvi) “RetSDR2” (SEQ ID No:21) or a functionally active derivative thereof, or a functionally active fragment thereof, or a homolog thereof, or a variant of “RetSDR2” encoded by a nucleic acid that hybridizes to the “RetSDR2” nucleic acid or its complement under low stringency conditions, and/or

[1498] (xxvii) “SFXN1” (SEQ ID No:24) or a functionally active derivative thereof, or a functionally active fragment thereof, or a homolog thereof, or a variant of “SFXN1” encoded by a nucleic acid that hybridizes to the “SFXN1” nucleic acid or its complement under low stringency conditions, and/or

[1499] (xxviii) “SPC18” (SEQ ID No:26) or a functionally active derivative thereof, or a functionally active fragment thereof, or a homolog thereof, or a variant of “SPC18” encoded by a nucleic acid that hybridizes to the “SPC18” nucleic acid or its complement under low stringency conditions, and/or

[1500] (xxix) “SPC22” (SEQ ID No:27) or a functionally active derivative thereof, or a functionally active fragment thereof, or a homolog thereof, or a variant of “SPC22” encoded by a nucleic acid that hybridizes to the “SPC22” nucleic acid or its complement under low stringency conditions, and/or

[1501] (xxx) “SPC25” (SEQ ID No:28) or a functionally active derivative thereof, or a functionally active fragment thereof, or a homolog thereof, or a variant of “SPC25” encoded by a nucleic acid that hybridizes to the “SPC25” nucleic acid or its complement under low stringency conditions, and/or

[1502] (xxxi) “SPTLC2” (SEQ ID No:117) or a functionally active derivative thereof, or a functionally active fragment thereof, or a homolog thereof, or a variant of “SPTLC2” encoded by a nucleic acid that hybridizes to the “SPTLC2” nucleic acid or its complement under low stringency conditions, and/or

[1503] (xxxii) “stearoyl-CoA desaturase” (SEQ ID No:29) or a functionally active derivative thereof, or a functionally active fragment thereof, or a homolog thereof, or a variant of “stearoyl-CoA desaturase” encoded by a nucleic acid that hybridizes to the “stearoyl-CoA desaturase” nucleic acid or its complement under low stringency conditions, and/or

[1504] (xxxiii) “STT3” (SEQ ID No:61) or a functionally active derivative thereof, or a functionally active fragment thereof, or a homolog thereof, or a variant of “STT3” encoded by a nucleic acid that hybridizes to the “STT3” nucleic acid or its complement under low stringency conditions, and/or

[1505] (xxxiv) “TWP21” (SEQ ID No:30) or a functionally active derivative thereof, or a functionally active fragment thereof, or a homolog thereof, or a variant of “TMP21” encoded by a nucleic acid that hybridizes to the “TMP21” nucleic acid or its complement under low stringency conditions, and/or

[1506] (xxxv) “UGCGL1” (SEQ ID No:45) or a functionally active derivative thereof, or a functionally active fragment thereof, or a homolog thereof, or a variant of “UGCGL1” encoded by a nucleic acid that hybridizes to the “UGCGL1” nucleic acid or its complement under low stringency conditions, and/or

[1507] (xxxvi) “visinin-like 1” (SEQ ID No:37) or a functionally active derivative thereof, or a functionally active fragment thereof, or a homolog thereof, or a variant of “visinin-like 1” encoded by a nucleic acid that hybridizes to the “visinin-like 1” nucleic acid or its complement under low stringency conditions, and/or

[1508] (xxxvii) “Wolframin” (SEQ ID No:67) or a functionally active derivative thereof, or a functionally active fragment thereof, or a homolog thereof, or a variant of “Wolframin” encoded by a nucleic acid that hybridizes to the “Wolframin” nucleic acid or its complement under low stringency conditions, and/or

[1509] (xxxviii) “YME1L1” (SEQ ID No:32) or a functionally active derivative thereof, or a functionally active fragment thereof, or a homolog thereof, or a variant of “YME1L1” encoded by a nucleic acid that hybridizes to the “YME1L1” nucleic acid or its complement under low stringency conditions, is present in the complex.

29. The method of any of No. 23-28 wherein said method is a method of screening for a drug for treatment or prevention of a disease or disorder such as neurodegenerative disease such as Alzheimer's disease.

[1510] 30. Use of a molecule that modulates the amount of, activity of, or the protein components of the complex of any one of No. 1-8 for the manufacture of a medicament for the treatment or prevention of a disease or disorder such as neurodegenerative disease such as Alzheimer's disease.

[1511] 31. A method for the production of a pharmaceutical composition comprising carrying out the method of any of No. 1-8 to identify a molecule that modulates the function, activity, composition or formation of said complex, and further comprising mixing the identified molecule with a pharmaceutically acceptable carrier.

[1512] 32. A method for diagnosing or screening for the presence of a disease or disorder or a predisposition for developing a disease or disorder in a subject, which disease or disorder is characterized by an aberrant amount of, activity of, or component composition of, or intracellular localization of the complex of any one of the No. 1-8, comprising determining the amount of, activity of, protein components of, and/or intracellular localization of, said complex and/or the transcription level of a gene dependent on the complex and/or the abundance and/or activity of a protein or protein complex dependent on the function of the complex and/or product of a gene dependent on the complex in a comparative sample derived from a subject, wherein a difference in said amount, activity, or protein components of, said complex in an analogous sample from a subject not having the disease or disorder or predisposition indicates the presence in the subject of the disease or disorder or predisposition in the subject.

33. The method of No. 32 wherein the amount of said complex is determined.

34. The method of No. 32 wherein the activity of said complex is determined.

[1513] 35. The method of No. 34 wherein said determining step comprises isolating from the subject said complex to produce said isolated complex and contacting said isolated complex in the presence or absence of a candidate molecule with a substrate of said complex and determining whether said substrate is processed in the absence of the candidate molecule and whether the processing of said substrate is modified in the presence of said candidate molecule.

36. The method of No. 32 wherein the amount of the individual protein components of said complex is determined.

37. The method of No. 36 wherein said determining step comprises determining whether

[1514] (i) “APP-C99” (SEQ ID No:120) or a functionally active derivative thereof, or a functionally active fragment thereof, or a homolog thereof, or a variant of “APP-C99” encoded by a nucleic acid that hybridizes to the “APP-C99” nucleic acid or its complement under low stringency conditions, and/or

[1515] (ii) “Nicastrin” (SEQ ID No:9) or a functionally active derivative thereof, or a functionally active fragment thereof, or a homolog thereof, or a variant of “Nicastrin” encoded by a nucleic acid that hybridizes to the “Nicastrin” nucleic acid or its complement under low stringency conditions, and/or

[1516] (iii) “Psen1” (SEQ ID No:3) or a functionally active derivative thereof, or a functionally active fragment thereof, or a homolog thereof, or a variant of “Psen1” encoded by a nucleic acid that hybridizes to the “Psen1” nucleic acid or its complement under low stringency conditions, and/or

[1517] (iv) “aph-1a” (SEQ ID No:1) or a functionally active derivative thereof, or a functionally active fragment thereof, or a homolog thereof, or a variant of “aph-1a” encoded by a nucleic acid that hybridizes to the “aph-1a” nucleic acid or its complement under low stringency conditions, and/or

[1518] (v) “APP” (SEQ ID No:23) or a functionally active derivative thereof, or a functionally active fragment thereof, or a homolog thereof, or a variant of “APP” encoded by a nucleic acid that hybridizes to the “APP” nucleic acid or its complement under low stringency conditions, and/or

[1519] (vi) “CtnnA1” (SEQ ID No:47) or a functionally active derivative thereof, or a functionally active fragment thereof, or a homolog thereof, or a variant of “CtnnA1” encoded by a nucleic acid that hybridizes to the “CtnnA1” nucleic acid or its complement under low stringency conditions, and/or

[1520] (vii) “CtnnA2” (SEQ ID No:48) or a functionally active derivative thereof, or a functionally active fragment thereof, or a homolog thereof, or a variant of “CtnnA2” encoded by a nucleic acid that hybridizes to the “CtnnA2” nucleic acid or its complement under low stringency conditions, and/or

[1521] (viii) “CtnnB1” (SEQ ID No:46) or a functionally active derivative thereof, or a functionally active fragment thereof, or a homolog thereof, or a variant of “CtnnB1” encoded by a nucleic acid that hybridizes to the “CtnnB1” nucleic acid or its complement under low stringency conditions, and/or

[1522] (ix) “CtnnD1” (SEQ ID No:49) or a functionally active derivative thereof, or a functionally active fragment thereof, or a homolog thereof, or a variant of “CtnnD1” encoded by a nucleic acid that hybridizes to the “CtnnD1” nucleic acid or its complement under low stringency conditions, and/or

[1523] (x) “JUP” (SEQ ID No:2) or a functionally active derivative thereof, or a functionally active fragment thereof, or a homolog thereof, or a variant of “JUP” encoded by a nucleic acid that hybridizes to the “JUP” nucleic acid or its complement under low stringency conditions, and/or

[1524] (xi) “NCadh” (SEQ ID No:50) or a functionally active derivative thereof, or a functionally active fragment thereof, or a homolog thereof, or a variant of “NCadh” encoded by a nucleic acid that hybridizes to the “NCadh” nucleic acid or its complement under low stringency conditions, and/or

[1525] (xii) “ACAT1” (SEQ ID No:4) or a functionally active derivative thereof, or a functionally active fragment thereof, or a homolog thereof, or a variant of “ACAT1” encoded by a nucleic acid that hybridizes to the “ACAT1” nucleic acid or its complement under low stringency conditions, and/or

[1526] (xiii) “CGI-13” (SEQ ID No:72) or a functionally active derivative thereof, or a functionally active fragment thereof, or a homolog thereof, or a variant of “CGI-13” encoded by a nucleic acid that hybridizes to the “CGI-13” nucleic acid or its complement under low stringency conditions, and/or

[1527] (xiv) “CK2B” (SEQ ID No:59) or a functionally active derivative thereof, or a functionally active fragment thereof, or a homolog thereof, or a variant of “CK2B” encoded by a nucleic acid that hybridizes to the “CK2B” nucleic acid or its complement under low stringency conditions, and/or

[1528] (xv) “CLGN” (SEQ ID No:54) or a functionally active derivative thereof, or a functionally active fragment thereof, or a homolog thereof, or a variant of “CLGN” encoded by a nucleic acid that hybridizes to the “CLGN” nucleic acid or its complement under low stringency conditions, and/or

[1529] (xvi) “ECSIT” (SEQ ID No:55) or a functionally active derivative thereof, or a functionally active fragment thereof, or a homolog thereof, or a variant of “ECSIT” encoded by a nucleic acid that hybridizes to the “ECSIT” nucleic acid or its complement under low stringency conditions, and/or

[1530] (xvii) “FACL3” (SEQ ID No:11) or a functionally active derivative thereof, or a functionally active fragment thereof, or a homolog thereof, or a variant of “FACL3” encoded by a nucleic acid that hybridizes to the “FACL3” nucleic acid or its complement under low stringency conditions, and/or

[1531] (xviii) “FADS2” (SEQ ID No:40) or a functionally active derivative thereof, or a functionally active fragment thereof, or a homolog thereof, or a variant of “FADS2” encoded by a nucleic acid that hybridizes to the “FADS2” nucleic acid or its complement under low stringency conditions, and/or

[1532] (xix) “FLJ20481” (SEQ ID No:82) or a functionally active derivative thereof, or a functionally active fragment thereof, or a homolog thereof, or a variant of “FLJ20481” encoded by a nucleic acid that hybridizes to the “FLJ20481” nucleic acid or its complement under low stringency conditions, and/or

[1533] (xx) “ITM2C” (SEQ ID No:13) or a functionally active derivative thereof, or a functionally active fragment thereof, or a homolog thereof, or a variant of “ITM2C” encoded by a nucleic acid that hybridizes to the “ITM2C” nucleic acid or its complement under low stringency conditions, and/or

[1534] (xxi) “ITPR1” (SEQ ID No:16) or a functionally active derivative thereof, or a functionally active fragment thereof, or a homolog thereof, or a variant of “ITPR1” encoded by a nucleic acid that hybridizes to the “ITPR1” nucleic acid or its complement under low stringency conditions, and/or

[1535] (xxii) “KIAA0363” (SEQ ID No:105) or a functionally active derivative thereof, or a functionally active fragment thereof, or a homolog thereof, or a variant of “KIAA0363” encoded by a nucleic acid that hybridizes to the “KIAA0363” nucleic acid or its complement under low stringency conditions, and/or

[1536] (xxiii) “MDR1” (SEQ ID No:18) or a functionally active derivative thereof, or a functionally active fragment thereof, or a homolog thereof, or a variant of “MDR1” encoded by a nucleic acid that hybridizes to the “MDR1” nucleic acid or its complement under low stringency conditions, and/or

[1537] (xxiv) “Neurotrypsin” (SEQ ID No:19) or a functionally active derivative thereof, or a functionally active fragment thereof, or a homolog thereof, or a variant of “Neurotrypsin” encoded by a nucleic acid that hybridizes to the “Neurotrypsin” nucleic acid or its complement under low stringency conditions, and/or

[1538] (xxv) “PTP LOC114971” (SEQ ID No:60) or a functionally active derivative thereof, or a functionally active fragment thereof, or a homolog thereof, or a variant of “PTP LOC114971” encoded by a nucleic acid that hybridizes to the “PTP LOC114971” nucleic acid or its complement under low stringency conditions, and/or

[1539] (xxvi) “RetSDR2” (SEQ ID No:21) or a functionally active derivative thereof, or a functionally active fragment thereof, or a homolog thereof, or a variant of “RetSDR2” encoded by a nucleic acid that hybridizes to the “RetSDR2” nucleic acid or its complement under low stringency conditions, and/or

[1540] (xxvii) “SFXN1” (SEQ ID No:24) or a functionally active derivative thereof, or a functionally active fragment thereof, or a homolog thereof, or a variant of “SFXN1” encoded by a nucleic acid that hybridizes to the “SFXN1” nucleic acid or its complement under low stringency conditions, and/or

[1541] (xxviii) “SPC18” (SEQ ID No:26) or a functionally active derivative thereof, or a functionally active fragment thereof, or a homolog thereof, or a variant of “SPC18” encoded by a nucleic acid that hybridizes to the “SPC18” nucleic acid or its complement under low stringency conditions, and/or

[1542] (xxix) “SPC22” (SEQ ID No:27) or a functionally active derivative thereof, or a functionally active fragment thereof, or a homolog thereof, or a variant of “SPC22” encoded by a nucleic acid that hybridizes to the “SPC22” nucleic acid or its complement under low stringency conditions, and/or

[1543] (xxx) “SPC25” (SEQ ID No:28) or a functionally active derivative thereof, or a functionally active fragment thereof, or a homolog thereof, or a variant of “SPC25” encoded by a nucleic acid that hybridizes to the “SPC25” nucleic acid or its complement under low stringency conditions, and/or

[1544] (xxxi) “SPTLC2” (SEQ ID No:117) or a functionally active derivative thereof, or a functionally active fragment thereof; or a homolog thereof, or a variant of “SPTLC2” encoded by a nucleic acid that hybridizes to the “SPTLC2” nucleic acid or its complement under low stringency conditions, and/or

[1545] (xxxii) “stearoyl-CoA desaturase” (SEQ ID No:29) or a functionally active derivative thereof, or a functionally active fragment thereof, or a homolog thereof, or a variant of “stearoyl-CoA desaturase” encoded by a nucleic acid that hybridizes to the “stearoyl-CoA desaturase” nucleic acid or its complement under low stringency conditions, and/or

[1546] (xxxiii) “STT3” (SEQ ID No:61) or a functionally active derivative thereof, or a functionally active fragment thereof, or a homolog thereof, or a variant of “STT3” encoded by a nucleic acid that hybridizes to the “STT3” nucleic acid or its complement under low stringency conditions, and/or

[1547] (xxxiv) “TMP21” (SEQ ID No:30) or a functionally active derivative thereof, or a functionally active fragment thereof, or a homolog thereof, or a variant of “TMP21” encoded by a nucleic acid that hybridizes to the “TMP21” nucleic acid or its complement under low stringency conditions, and/or

[1548] (xxxv) “UGCGL1” (SEQ ID No:45) or a functionally active derivative thereof, or a functionally active fragment thereof, or a homolog thereof, or a variant of “UGCGL1” encoded by a nucleic acid that hybridizes to the “UGCGL1” nucleic acid or its complement under low stringency conditions, and/or

[1549] (xxxvi) “visinin-like 1” (SEQ ID No:37) or a functionally active derivative thereof, or a functionally active fragment thereof, or a homolog thereof, or a variant of “visinin-like 1” encoded by a nucleic acid that hybridizes to the “visinin-like 1” nucleic acid or its complement under low stringency conditions, and/or

[1550] (xxxvii) “Wolframin” (SEQ ID No:67) or a functionally active derivative thereof, or a functionally active fragment thereof, or a homolog thereof, or a variant of “Wolframin” encoded by a nucleic acid that hybridizes to the “Wolframin” nucleic acid or its complement under low stringency conditions, and/or

[1551] (xxxviii) “YME1L1” (SEQ ID No:32) or a functionally active derivative thereof, or a functionally active fragment thereof, or a homolog thereof, or a variant of “YME1L1” encoded by a nucleic acid that hybridizes to the “YME1L1” nucleic acid or its complement under low stringency conditions, is present in the complex.

38. The complex of any one of No. 1-8, or the antibody or fragment of No. 15, for use in a method of diagnosing a disease or disorder such as neurodegenerative disease such as Alzheimer's disease.

[1552] 39. A method for treating or preventing a disease or disorder characterized by an aberrant amount of, activity or component composition of or intracellular localization of, the complex of anyone of No. 1-8, comprising administering to a subject in need of such treatment or prevention a therapeutically effective amount of one or more molecules that modulate the amount of, transactivation of a Gal4-driven reporter gene (e.g. by modifying the expression of one or several interacting proteins in cells by means of RNAi (siRNA) and/or plasmids encoding the interacting protein(s)), the production of Abeta-40 and Abeta-42 peptides by ELISA (e.g. by modifying the expression of one or several interacting proteins in cells by means of RNAi (siRNA) and/or plasmids encoding the interacting protein(s)), the production of C-terminal APP fragments in cell lines or transgenic animals by western blot (e.g. by modifying the expression of one or several interacting proteins in cells by means of RNAi (siRNA) and/or plasmids encoding the interacting protein(s)) or the proteolytic activity of beta- or gamma secretases towards bacterially expressed APP fragments in vitro (e.g. by modifying the expression of one or several interacting proteins in cells by means of RNAi (siRNA) and/or plasmids encoding the interacting protein(s)), or protein components of, said complex.

40. The method according to No. 39 wherein said disease or disorder involves decreased levels of the amount or activity of said complex.

41. The method according to No. 39 wherein said disease or disorder involves increased levels of the amount or activity of said complex.

42. Complex of any of No. 1-8 and/or protein selected from the following proteins

[1553] (i) “APP-C99” (SEQ ID No:120) or a functionally active derivative thereof, or a functionally active fragment thereof, or a homolog thereof, or a variant of “APP-C99” encoded by a nucleic acid that hybridizes to the “APP-C99” nucleic acid or its complement under low stringency conditions,

[1554] (ii) “Nicastrin” (SEQ ID No:9) or a functionally active derivative thereof, or a functionally active fragment thereof, or a homolog thereof, or a variant of “Nicastrin” encoded by a nucleic acid that hybridizes to the “Nicastrin” nucleic acid or its complement under low stringency conditions,

[1555] (iii) “Psen1” (SEQ ID No:3) or a functionally active derivative thereof, or a functionally active fragment thereof, or a homolog thereof, or a variant of “Psen1” encoded by a nucleic acid that hybridizes to the “Psen1” nucleic acid or its complement under low stringency conditions,

[1556] (iv) “aph-1a” (SEQ ID No:1) or a functionally active derivative thereof, or a functionally active fragment thereof, or a homolog thereof, or a variant of “aph-1a” encoded by a nucleic acid that hybridizes to the “aph-1a” nucleic acid or its complement under low stringency conditions,

[1557] (v) “APP” (SEQ ID No:23) or a functionally active derivative thereof, or a functionally active fragment thereof, or a homolog thereof, or a variant of “APP” encoded by a nucleic acid that hybridizes to the “APP” nucleic acid or its complement under low stringency conditions,

[1558] (vi) “CtnnA1” (SEQ ID No:47) or a functionally active derivative thereof, or a functionally active fragment thereof, or a homolog thereof, or a variant of “CtnnA1” encoded by a nucleic acid that hybridizes to the “CtnnA1” nucleic acid or its complement under low stringency conditions,

[1559] (vii) “CtnnA2” (SEQ ID No:48) or a functionally active derivative thereof, or a functionally active fragment thereof, or a homolog thereof, or a variant of “CtnnA2” encoded by a nucleic acid that hybridizes to the “CtnnA2” nucleic acid or its complement under low stringency conditions,

[1560] (viii) “CtnnB1” (SEQ ID No:46) or a functionally active derivative thereof, or a functionally active fragment thereof, or a homolog thereof, or a variant of “CtnnB1” encoded by a nucleic acid that hybridizes to the “CtnnB1” nucleic acid or its complement under low stringency conditions,

[1561] (ix) “CtnnD1” (SEQ ID No:49) or a functionally active derivative thereof, or a functionally active fragment thereof, or a homolog thereof, or a variant of “CtnnD1” encoded by a nucleic acid that hybridizes to the “CtnnD1” nucleic acid or its complement under low stringency conditions,

[1562] (x) “JUP” (SEQ ID No:2) or a functionally active derivative thereof, or a functionally active fragment thereof, or a homolog thereof, or a variant of “JUP” encoded by a nucleic acid that hybridizes to the “JUP” nucleic acid or its complement under low stringency conditions,

[1563] (xi) “NCadh” (SEQ ID No:50) or a functionally active derivative thereof, or a functionally active fragment thereof, or a homolog thereof, or a variant of “NCadh” encoded by a nucleic acid that hybridizes to the “NCadh” nucleic acid or its complement under low stringency conditions,

[1564] (xii) “ACAT1” (SEQ ID No:4) or a functionally active derivative thereof, or a functionally active fragment thereof, or a homolog thereof, or a variant of “ACAT1” encoded by a nucleic acid that hybridizes to the “ACAT1” nucleic acid or its complement under low stringency conditions,

[1565] (xiii) “CGI-13” (SEQ ID No:72) or a functionally active derivative thereof, or a functionally active fragment thereof, or a homolog thereof, or a variant of “CGI-13” encoded by a nucleic acid that hybridizes to the “CGI-13” nucleic acid or its complement under low stringency conditions,

[1566] (xiv) “CK2B” (SEQ ID No:59) or a functionally active derivative thereof, or a functionally active fragment thereof, or a homolog thereof, or a variant of “CK2B” encoded by a nucleic acid that hybridizes to the “CK2B” nucleic acid or its complement under low stringency conditions,

[1567] (xv) “CLGN” (SEQ ID No:54) or a functionally active derivative thereof, or a functionally active fragment thereof, or a homolog thereof, or a variant of “CLGN” encoded by a nucleic acid that hybridizes to the “CLGN” nucleic acid or its complement under low stringency conditions,

[1568] (xvi) “ECSIT” (SEQ ID No:55) or a functionally active derivative thereof, or a functionally active fragment thereof, or a homolog thereof, or a variant of “ECSIT” encoded by a nucleic acid that hybridizes to the “ECSIT” nucleic acid or its complement under low stringency conditions,

[1569] (xvii) “FACL3” (SEQ ID No:11) or a functionally active derivative thereof, or a functionally active fragment thereof, or a homolog thereof, or a variant of “FACL3” encoded by a nucleic acid that hybridizes to the “FACL3” nucleic acid or its complement under low stringency conditions,

[1570] (xviii) “FADS2” (SEQ ID No:40) or a functionally active derivative thereof, or a functionally active fragment thereof, or a homolog thereof, or a variant of “FADS2” encoded by a nucleic acid that hybridizes to the “FADS2” nucleic acid or its complement under low stringency conditions,

[1571] (xix) “FLJ20481” (SEQ ID No:82) or a functionally active derivative thereof, or a functionally active fragment thereof, or a homolog thereof, or a variant of “FLJ20481” encoded by a nucleic acid that hybridizes to the “FLJ20481” nucleic acid or its complement under low stringency conditions,

[1572] (xx) “ITM2C” (SEQ ID No:13) or a functionally active derivative thereof, or a functionally active fragment thereof, or a homolog thereof, or a variant of “ITM2C” encoded by a nucleic acid that hybridizes to the “ITM2C” nucleic acid or its complement under low stringency conditions,

[1573] (xxi) “ITPR1” (SEQ ID No:16) or a functionally active derivative thereof, or a functionally active fragment thereof, or a homolog thereof, or a variant of “ITPR1” encoded by a nucleic acid that hybridizes to the “ITPR1” nucleic acid or its complement under low stringency conditions,

[1574] (xxii) “KIAA0363” (SEQ ID No:105) or a functionally active derivative thereof, or a functionally active fragment thereof, or a homolog thereof, or a variant of “KIAA0363” encoded by a nucleic acid that hybridizes to the “KIAA0363” nucleic acid or its complement under low stringency conditions,

[1575] (xxiii) “MDR1” (SEQ ID No:18) or a functionally active derivative thereof, or a functionally active fragment thereof, or a homolog thereof, or a variant of “MDR1” encoded by a nucleic acid that hybridizes to the “MDR1” nucleic acid or its complement under low stringency conditions,

[1576] (xxiv) “Neurotrypsin” (SEQ ID No:19) or a functionally active derivative thereof, or a functionally active fragment thereof, or a homolog thereof, or a variant of “Neurotrypsin” encoded by a nucleic acid that hybridizes to the “Neurotrypsin” nucleic acid or its complement under low stringency conditions,

[1577] (xxv) “PTP LOC114971” (SEQ ID No:60) or a functionally active derivative thereof, or a functionally active fragment thereof, or a homolog thereof, or a variant of “PTP LOC114971” encoded by a nucleic acid that hybridizes to the “PTP LOC114971” nucleic acid or its complement under low stringency conditions,

[1578] (xxvi) “RetSDR2” (SEQ ID No:21) or a functionally active derivative thereof, or a functionally active fragment thereof, or a homolog thereof, or a variant of “RetSDR2” encoded by a nucleic acid that hybridizes to the “RetSDR2” nucleic acid or its complement under low stringency conditions,

[1579] (xxvii) “SFXN1” (SEQ ID No:24) or a functionally active derivative thereof, or a functionally active fragment thereof, or a homolog thereof, or a variant of “SFXN1” encoded by a nucleic acid that hybridizes to the “SFXN1” nucleic acid or its complement under low stringency conditions,

[1580] (xxviii) “SPC18” (SEQ ID No:26) or a functionally active derivative thereof, or a functionally active fragment thereof, or a homolog thereof, or a variant of “SPC18” encoded by a nucleic acid that hybridizes to the “SPC18” nucleic acid or its complement under low stringency conditions,

[1581] (xxix) “SPC22” (SEQ ID No:27) or a functionally active derivative thereof, or a functionally active fragment thereof, or a homolog thereof, or a variant of “SPC22” encoded by a nucleic acid that hybridizes to the “SPC22” nucleic acid or its complement under low stringency conditions,

[1582] (xxx) “SPC25” (SEQ ID No:28) or a functionally active derivative thereof, or a functionally active fragment thereof, or a homolog thereof, or a variant of “SPC25” encoded by a nucleic acid that hybridizes to the “SPC25” nucleic acid or its complement under low stringency conditions,

[1583] (xxxi) “SPTLC2” (SEQ ID No:117) or a functionally active derivative thereof, or a functionally active fragment thereof, or a homolog thereof, or a variant of “SPTLC2” encoded by a nucleic acid that hybridizes to the “SPTLC2” nucleic acid or its complement under low stringency conditions,

[1584] (xxxii) “stearoyl-CoA desaturase” (SEQ ID No:29) or a functionally active derivative thereof, or a functionally active fragment thereof, or a homolog thereof, or a variant of “stearoyl-CoA desaturase” encoded by a nucleic acid that hybridizes to the “stearoyl-CoA desaturase” nucleic acid or its complement under low stringency conditions,

[1585] (xxxiii) “STT3” (SEQ ID No:61) or a functionally active derivative thereof, or a functionally active fragment thereof, or a homolog thereof, or a variant of “STT3” encoded by a nucleic acid that hybridizes to the “STT3” nucleic acid or its complement under low stringency conditions,

[1586] (xxxiv) “TMP21” (SEQ ID No:30) or a functionally active derivative thereof, or a functionally active fragment thereof, or a homolog thereof, or a variant of “TMP21” encoded by a nucleic acid that hybridizes to the “TMP21” nucleic acid or its complement under low stringency conditions,

[1587] (xxxv) “UGCGL1” (SEQ ID No:45) or a functionally active derivative thereof, or a functionally active fragment thereof, or a homolog thereof, or a variant of “UGCGL1” encoded by a nucleic acid that hybridizes to the “UGCGL1” nucleic acid or its complement under low stringency conditions,

[1588] (xxxvi) “visinin-like 1” (SEQ ID No:37) or a functionally active derivative thereof, or a functionally active fragment thereof, or a homolog thereof, or a variant of “visinin-like 1” encoded by a nucleic acid that hybridizes to the “visinin-like 1” nucleic acid or its complement under low stringency conditions,

[1589] (xxxvii) “Wolframin” (SEQ ID No:67) or a functionally active derivative thereof, or a functionally active fragment thereof, or a homolog thereof, or a variant of “Wolframin” encoded by a nucleic acid that hybridizes to the “Wolframin” nucleic acid or its complement under low stringency conditions,

[1590] (xxxviii) “YME1L1” (SEQ ID No:32) or a functionally active derivative thereof, or a functionally active fragment thereof, or a homolog thereof, or a variant of “YME1L1” encoded by a nucleic acid that hybridizes to the “YME1L1” nucleic acid or its complement under low stringency conditions, as a target for an active agent of a pharmaceutical, preferably a drug target in the treatment or prevention of a disease or disorder such as neurodegenerative disease such as Alzheimer's disease.

[1591] The invention further relates to the following embodiments of the Bace1-complex (a)

1. A protein complex selected from complex (l) and comprising

(a) at least one first protein selected from the group consisting of:

[1592] (i) “BACE1” (SEQ ID No:38) or a functionally active derivative thereof, or a functionally active fragment thereof, or a homolog thereof, or a variant of “BACE1” encoded by a nucleic acid that hybridizes to the “BACE1” nucleic acid or its complement under low stringency conditions, and

[1593] (ii) “Nicastrin” (SEQ ID No:9) or a functionally active derivative thereof, or a functionally active fragment thereof, or a homolog thereof, or a variant of “Nicastrin” encoded by a nucleic acid that hybridizes to the “Nicastrin” nucleic acid or its complement under low stringency conditions, and

(b) at least one second protein, which second protein is selected from the group consisting of:

[1594] (i) “CGI-13” (SEQ ID No:72) or a functionally active derivative thereof, or a functionally active fragment thereof, or a homolog thereof, or a variant of “CGI-13” encoded by a nucleic acid that hybridizes to the “CGI-13” nucleic acid or its complement under low stringency conditions,

[1595] (ii) “Cadherin EGF LAG seven-pass G-type receptor 2” (SEQ ID No:35) or a functionally active derivative thereof, or a functionally active fragment thereof, or a homolog thereof, or a variant of “Cadherin EGF LAG seven-pass G-type receptor 2” encoded by a nucleic acid that hybridizes to the “Cadherin EGF LAG seven-pass G-type receptor 2” nucleic acid or its complement under low stringency conditions,

[1596] (iii) “Calsyntenin 1” (SEQ ID No:36) or a functionally active derivative thereof, or a functionally active fragment thereof, or a homolog thereof, or a variant of “Calsyntenin 1” encoded by a nucleic acid that hybridizes to the “Calsyntenin 1” nucleic acid or its complement under low stringency conditions,

[1597] (iv) “Delta-6 fatty acid desaturase” (SEQ ID No:76) or a functionally active derivative thereof, or a functionally active fragment thereof, or a homolog thereof, or a variant of “Delta-6 fatty acid desaturase” encoded by a nucleic acid that hybridizes to the “Delta-6 fatty acid desaturase” nucleic acid or its complement under low stringency conditions,

[1598] (v) “Delta-like homolog” (SEQ ID No:118) or a functionally active derivative thereof, or a functionally active fragment thereof, or a homolog thereof, or a variant of “Delta-like homolog” encoded by a nucleic acid that hybridizes to the “Delta-like homolog” nucleic acid or its complement under low stringency conditions,

[1599] (vi) “FLJ30668” (SEQ ID No:69) or a functionally active derivative thereof, or a functionally active fragment thereof, or a homolog thereof, or a variant of “FLJ30668” encoded by a nucleic acid that hybridizes to the “FLJ30668” nucleic acid or its complement under low stringency conditions,

[1600] (vii) “FLJ39249” (SEQ ID No:71) or a functionally active derivative thereof, or a functionally active fragment thereof, or a homolog thereof, or a variant of “FLJ39249” encoded by a nucleic acid that hybridizes to the “FLJ39249” nucleic acid or its complement under low stringency conditions,

[1601] (viii) “ITCH” (SEQ ID No:73) or a functionally active derivative thereof, or a functionally active fragment thereof, or a homolog thereof, or a variant of “ITCH” encoded by a nucleic acid that hybridizes to the “ITCH” nucleic acid or its complement under low stringency conditions,

[1602] (ix) “KIAA1250” (SEQ ID No:107) or a functionally active derivative thereof, or a functionally active fragment thereof, or a homolog thereof, or a variant of “KIAA1250” encoded by a nucleic acid that hybridizes to the “KIAA1250” nucleic acid or its complement under low stringency conditions,

[1603] (x) “Nogo-A” (SEQ ID No:77) or a functionally active derivative thereof, or a functionally active fragment thereof, or a homolog thereof, or a variant of “Nogo-A” encoded by a nucleic acid that hybridizes to the “Nogo-A” nucleic acid or its complement under low stringency conditions,

[1604] (xi) “PDGFRB” (SEQ ID No:78) or a functionally active derivative thereof, or a functionally active fragment thereof, or a homolog thereof, or a variant of “PDGFRB” encoded by a nucleic acid that hybridizes to the “PDGFRB” nucleic acid or its complement under low stringency conditions,

[1605] (xii) “PTK7” (SEQ ID No:80) or a functionally active derivative thereof, or a functionally active fragment thereof, or a homolog thereof, or a variant of “PTK7” encoded by a nucleic acid that hybridizes to the “PTK7” nucleic acid or its complement under low stringency conditions,

[1606] (xiii) “SERPINA1” (SEQ ID No:83) or a functionally active derivative thereof, or a functionally active fragment thereof, or a homolog thereof, or a variant of “SERPINA1” encoded by a nucleic acid that hybridizes to the “SERPINA1” nucleic acid or its complement under low stringency conditions,

[1607] (xiv) “SIM TO Y71H10A. 2.P” (SEQ ID No:85) or a functionally active derivative thereof, or a functionally active fragment thereof, or a homolog thereof, or a variant of “SIM TO Y71H10A. 2.P” encoded by a nucleic acid that hybridizes to the “SIM TO Y71H10A. 2.P” nucleic acid or its complement under low stringency conditions,

[1608] (xv) “STX10” (SEQ ID No:65) or a functionally active derivative thereof, or a functionally active fragment thereof, or a homolog thereof, or a variant of “STX10” encoded by a nucleic acid that hybridizes to the “STX10” nucleic acid or its complement under low stringency conditions,

[1609] (xvi) “Sortilin-related receptor” (SEQ ID No:52) or a functionally active derivative thereof, or a functionally active fragment thereof, or a homolog thereof, or a variant of “Sortilin-related receptor” encoded by a nucleic acid that hybridizes to the “Sortilin-related receptor” nucleic acid or its complement under low stringency conditions,

[1610] (xvii) “Thioredoxin domain-containing protein” (SEQ ID No:101) or a functionally active derivative thereof, or a functionally active fragment thereof, or a homolog thereof, or a variant of “Thioredoxin domain-containing protein” encoded by a nucleic acid that hybridizes to the “Thioredoxin domain-containing protein” nucleic acid or its complement under low stringency conditions,

[1611] (xviii) “integral membrane transporter protein” (SEQ ID No:114) or a functionally active derivative thereof, or a functionally active fragment thereof, or a homolog thereof, or a variant of “integral membrane transporter protein” encoded by a nucleic acid that hybridizes to the “integral membrane transporter protein” nucleic acid or its complement under low stringency conditions, and

[1612] (xix) “kinectin 1 (kinesin receptor)” (SEQ ID No:90) or a functionally active derivative thereof, or a functionally active fragment thereof, or a homolog thereof, or a variant of “kinectin 1 (kinesin receptor)” encoded by a nucleic acid that hybridizes to the “kinectin 1 (kinesin receptor)” nucleic acid or its complement under low stringency conditions, and a complex (II) comprising at least two of said second proteins, wherein said low stringency conditions comprise hybridization in a buffer comprising 35% formamide, 5×SSC, 50 mM Tris-HCI (pH 7.5), 5 mM EDTA, 0.02% PVP, 0.02% Ficoll, 0.2% BSA, 100 ug/ml denatured salmon sperm DNA, and 10% (wt/vol) dextran sulfate for 18-20 hours at 40 Celsius, washing in a buffer consisting of 2×SSC, 25 mM Tris-HCI (pH 7.4), 5 mM EDTA, and 0.1% SDS for 1.5 hours at 55 Celsius, and washing in a buffer consisting of 2×SSC, 25 mM Tris-HCI (pH 7.4), 5 mM EDTA, and 0.1% SDS for 1.5 hours at 60 Celsius.

[1613] 2. The protein complex according to No. 1 wherein the first protein is the protein Bace1 (SEQ ID NO. 129), or a functionally active derivative thereof, or a functionally active fragment thereof, or a homolog thereof, or a variant of ‘Bace1’ encoded by a nucleic acid that hybridizes to the ‘Bace1’ under low stringency conditions.

3. The protein complex according to No. 1 selected from complex (1) and comprising the following proteins:

[1614] (i) “BACE1” (SEQ ID No:38) or a functionally active derivative thereof, or a functionally active fragment thereof, or a homolog thereof, or a variant of “BACE1” encoded by a nucleic acid that hybridizes to the “BACE1” nucleic acid or its complement under low stringency conditions,

[1615] (ii) “CGI-13” (SEQ ID No:72) or a functionally active derivative thereof, or a functionally active fragment thereof, or a homolog thereof, or a variant of “CGI-13” encoded by a nucleic acid that hybridizes to the “CGI-13” nucleic acid or its complement under low stringency conditions,

[1616] (iii) “Cadherin EGF LAG seven-pass G-type receptor 2” (SEQ ID No:35) or a functionally active derivative thereof, or a functionally active fragment thereof, or a homolog thereof, or a variant of “Cadherin EGF LAG seven-pass G-type receptor 2” encoded by a nucleic acid that hybridizes to the “Cadherin EGF LAG seven-pass G-type receptor 2” nucleic acid or its complement under low stringency conditions,

[1617] (iv) “Calsyntenin 1” (SEQ ID No:36) or a functionally active derivative thereof, or a functionally active fragment thereof, or a homolog thereof, or a variant of “Calsyntenin 1” encoded by a nucleic acid that hybridizes to the “Calsyntenin 1” nucleic acid or its complement under low stringency conditions,

[1618] (v) “Delta-6 fatty acid desaturase” (SEQ ID No:76) or a functionally active derivative thereof, or a functionally active fragment thereof, or a homolog thereof, or a variant of “Delta-6 fatty acid desaturase” encoded by a nucleic acid that hybridizes to the “Delta-6 fatty acid desaturase” nucleic acid or its complement under low stringency conditions,

[1619] (vi) “Delta-like homolog” (SEQ ID No:118) or a functionally active derivative thereof, or a functionally active fragment thereof, or a homolog thereof, or a variant of “Delta-like homolog” encoded by a nucleic acid that hybridizes to the “Delta-like homolog” nucleic acid or its complement under low stringency conditions,

[1620] (vii) “FLJ30668” (SEQ ID No:69) or a functionally active derivative thereof, or a functionally active fragment thereof, or a homolog thereof, or a variant of “FLJ30668” encoded by a nucleic acid that hybridizes to the “FLJ30668” nucleic acid or its complement under low stringency conditions,

[1621] (viii) “FLJ39249” (SEQ ID No:71) or a functionally active derivative thereof, or a functionally active fragment thereof, or a homolog thereof, or a variant of “FLJ39249” encoded by a nucleic acid that hybridizes to the “FLJ39249” nucleic acid or its complement under low stringency conditions,

[1622] (ix) “ITCH” (SEQ ID No:73) or a functionally active derivative thereof, or a functionally active fragment thereof, or a homolog thereof, or a variant of “ITCH” encoded by a nucleic acid that hybridizes to the “ITCH” nucleic acid or its complement under low stringency conditions,

[1623] (x) “KIAA1250” (SEQ ID No:107) or a functionally active derivative thereof, or a functionally active fragment thereof, or a homolog thereof, or a variant of “KIAA1250” encoded by a nucleic acid that hybridizes to the “KIAA1250” nucleic acid or its complement under low stringency conditions,

[1624] (xi) “Nicastrin” (SEQ ID No:9) or a functionally active derivative thereof, or a functionally active fragment thereof, or a homolog thereof, or a variant of “Nicastrin” encoded by a nucleic acid that hybridizes to the “Nicastrin” nucleic acid or its complement under low stringency conditions,

[1625] (xii) “Nogo-A” (SEQ ID No:77) or a functionally active derivative thereof, or a functionally active fragment thereof, or a homolog thereof, or a variant of “Nogo-A” encoded by a nucleic acid that hybridizes to the “Nogo-A” nucleic acid or its complement under low stringency conditions,

[1626] (xiii) “PDGFRB” (SEQ ID No:78) or a functionally active derivative thereof, or a functionally active fragment thereof, or a homolog thereof, or a variant of “PDGFRB” encoded by a nucleic acid that hybridizes to the “PDGFRB” nucleic acid or its complement under low stringency conditions,

[1627] (xiv) “PTK7” (SEQ ID No:80) or a functionally active derivative thereof, or a functionally active fragment thereof, or a homolog thereof, or a variant of “PTK7” encoded by a nucleic acid that hybridizes to the “PTK7” nucleic acid or its complement under low stringency conditions,

[1628] (xv) “SERPINA1” (SEQ ID No:83) or a functionally active derivative thereof, or a functionally active fragment thereof, or a homolog thereof, or a variant of “SERPINA1” encoded by a nucleic acid that hybridizes to the “SERPINA1” nucleic acid or its complement under low stringency conditions,

[1629] (xvi) “SIM TO Y71H10A. 2.P” (SEQ ID No:85) or a functionally active derivative thereof, or a functionally active fragment thereof, or a homolog thereof, or a variant of “SIM TO Y71H10A. 2.P” encoded by a nucleic acid that hybridizes to the “SIM TO Y71H10A. 2.P” nucleic acid or its complement under low stringency conditions,

[1630] (xvii) “STX10” (SEQ ID No:65) or a functionally active derivative thereof, or a functionally active fragment thereof, or a homolog thereof, or a variant of “STX10” encoded by a nucleic acid that hybridizes to the “STX10” nucleic acid or its complement under low stringency conditions,

[1631] (xviii) “Sortilin-related receptor” (SEQ ID No:52) or a functionally active derivative thereof, or a functionally active fragment thereof, or a homolog thereof, or a variant of “Sortilin-related receptor” encoded by a nucleic acid that hybridizes to the “Sortilin-related receptor” nucleic acid or its complement under low stringency conditions,

[1632] (xix) “Thioredoxin domain-containing protein” (SEQ ID No:101) or a functionally active derivative thereof, or a functionally active fragment thereof, or a homolog thereof, or a variant of “Thioredoxin domain-containing protein” encoded by a nucleic acid that hybridizes to the “Thioredoxin domain-containing protein” nucleic acid or its complement under low stringency conditions,

[1633] (xx) “integral membrane transporter protein” (SEQ ID No:114) or a functionally active derivative thereof, or a functionally active fragment thereof, or a homolog thereof, or a variant of “integral membrane transporter protein” encoded by a nucleic acid that hybridizes to the “integral membrane transporter protein” nucleic acid or its complement under low stringency conditions, and/or

[1634] (xxi) “kinectin 1 (kinesin receptor)” (SEQ ID No:90) or a functionally active derivative thereof, or a functionally active fragment thereof, or a homolog thereof, or a variant of “kinectin 1 (kinesin receptor)” encoded by a nucleic acid that hybridizes to the “kinectin 1 (kinesin receptor)” nucleic acid or its complement under low stringency conditions.

4. The protein complex according to No. 1 comprising all but 1-18 of the following proteins:

[1635] (i) “BACE1” (SEQ ID No:38) or a functionally active derivative thereof, or a functionally active fragment thereof, or a homolog thereof, or a variant of “BACE1” encoded by a nucleic acid that hybridizes to the “BACE1” nucleic acid or its complement under low stringency conditions,

[1636] (ii) “CGI-13” (SEQ ID No:72) or a functionally active derivative thereof, or a functionally active fragment thereof, or a homolog thereof, or a variant of “CGI-13” encoded by a nucleic acid that hybridizes to the “CGI-13” nucleic acid or its complement under low stringency conditions,

[1637] (iii) “Cadherin EGF LAG seven-pass G-type receptor 2” (SEQ ID No:35) or a functionally active derivative thereof, or a functionally active fragment thereof, or a homolog thereof, or a variant of “Cadherin EGF LAG seven-pass G-type receptor 2” encoded by a nucleic acid that hybridizes to the “Cadherin EGF LAG seven-pass G-type receptor 2” nucleic acid or its complement under low stringency conditions,

[1638] (iv) “Calsyntenin 1” (SEQ ID No:36) or a functionally active derivative thereof, or a functionally active fragment thereof, or a homolog thereof, or a variant of “Calsyntenin 1” encoded by a nucleic acid that hybridizes to the “Calsyntenin 1” nucleic acid or its complement under low stringency conditions,

[1639] (v) “Delta-6 fatty acid desaturase” (SEQ ID No:76) or a functionally active derivative thereof, or a functionally active fragment thereof, or a homolog thereof, or a variant of “Delta-6 fatty acid desaturase” encoded by a nucleic acid that hybridizes to the “Delta-6 fatty acid desaturase” nucleic acid or its complement under low stringency conditions,

[1640] (vi) “Delta-like homolog” (SEQ ID No:118) or a functionally active derivative thereof, or a functionally active fragment thereof, or a homolog thereof, or a variant of “Delta-like homolog” encoded by a nucleic acid that hybridizes to the “Delta-like homolog” nucleic acid or its complement under low stringency conditions,

[1641] (vii) “FLJ30668” (SEQ ID No:69) or a functionally active derivative thereof, or a functionally active fragment thereof, or a homolog thereof, or a variant of “FLJ30668” encoded by a nucleic acid that hybridizes to the “FLJ30668” nucleic acid or its complement under low stringency conditions,

[1642] (viii) “FLJ39249” (SEQ ID No:71) or a functionally active derivative thereof, or a functionally active fragment thereof, or a homolog thereof, or a variant of “FLJ39249” encoded by a nucleic acid that hybridizes to the “FLJ39249” nucleic acid or its complement under low stringency conditions,

[1643] (ix) “ITCH” (SEQ ID No:73) or a functionally active derivative thereof, or a functionally active fragment thereof, or a homolog thereof, or a variant of “ITCH” encoded by a nucleic acid that hybridizes to the “ITCH” nucleic acid or its complement under low stringency conditions,

[1644] (x) “KIAA1250” (SEQ ID No:107) or a functionally active derivative thereof, or a functionally active fragment thereof, or a homolog thereof, or a variant of “KIAA1250” encoded by a nucleic acid that hybridizes to the “KIAA1250” nucleic acid or its complement under low stringency conditions,

[1645] (xi) “Nicastrin” (SEQ ID No:9) or a functionally active derivative thereof, or a functionally active fragment thereof, or a homolog thereof, or a variant of “Nicastrin” encoded by a nucleic acid that hybridizes to the “Nicastrin” nucleic acid or its complement under low stringency conditions,

[1646] (xii) “Nogo-A” (SEQ ID No:77) or a functionally active derivative thereof, or a functionally active fragment thereof, or a homolog thereof, or a variant of “Nogo-A” encoded by a nucleic acid that hybridizes to the “Nogo-A” nucleic acid or its complement under low stringency conditions,

[1647] (xiii) “PDGFRB” (SEQ ID No:78) or a functionally active derivative thereof, or a functionally active fragment thereof, or a homolog thereof, or a variant of “PDGFRB” encoded by a nucleic acid that hybridizes to the “PDGFRB” nucleic acid or its complement under low stringency conditions,

[1648] (xiv) “PTK7” (SEQ ID No:80) or a functionally active derivative thereof, or a functionally active fragment thereof, or a homolog thereof, or a variant of “PTK7” encoded by a nucleic acid that hybridizes to the “PTK7” nucleic acid or its complement under low stringency conditions,

[1649] (xv) “SERPINA1” (SEQ ID No:83) or a functionally active derivative thereof, or a functionally active fragment thereof, or a homolog thereof, or a variant of “SERPINA1” encoded by a nucleic acid that hybridizes to the “SERPINA1” nucleic acid or its complement under low stringency conditions,

[1650] (xvi) “SIM TO Y71H10A. 2.P” (SEQ ID No:85) or a functionally active derivative thereof, or a functionally active fragment thereof, or a homolog thereof, or a variant of “SIM TO Y71H10A. 2.P” encoded by a nucleic acid that hybridizes to the “SIM TO Y71H10A. 2.P” nucleic acid or its complement under low stringency conditions,

[1651] (xvii) “STX10” (SEQ ID No:65) or a functionally active derivative thereof, or a functionally active fragment thereof, or a homolog thereof, or a variant of “STX10” encoded by a nucleic acid that hybridizes to the “STX10” nucleic acid or its complement under low stringency conditions,

[1652] (xviii) “Sortilin-related receptor” (SEQ ID No:52) or a functionally active derivative thereof, or a functionally active fragment thereof, or a homolog thereof, or a variant of “Sortilin-related receptor” encoded by a nucleic acid that hybridizes to the “Sortilin-related receptor” nucleic acid or its complement under low stringency conditions,

[1653] (xix) “Thioredoxin domain-containing protein” (SEQ ID No:101) or a functionally active derivative thereof, or a functionally active fragment thereof, or a homolog thereof, or a variant of “Thioredoxin domain-containing protein” encoded by a nucleic acid that hybridizes to the “Thioredoxin domain-containing protein” nucleic acid or its complement under low stringency conditions,

[1654] (xx) “integral membrane transporter protein” (SEQ ID No:114) or a functionally active derivative thereof, or a functionally active fragment thereof, or a homolog thereof, or a variant of “integral membrane transporter protein” encoded by a nucleic acid that hybridizes to the “integral membrane transporter protein” nucleic acid or its complement under low stringency conditions,

[1655] (xxi) “kinectin 1 (kinesin receptor)” (SEQ ID No:90) or a functionally active derivative thereof, or a functionally active fragment thereof, or a homolog thereof, or a variant of “kinectin 1 (kinesin receptor)” encoded by a nucleic acid that hybridizes to the “kinectin 1 (kinesin receptor)” nucleic acid or its complement under low stringency conditions.

[1656] 5. The complex of any of No. 1-4 comprising a functionally active derivative of said first protein and/or a functionally active derivative of said second protein, wherein the functionally active derivative is a fusion protein comprising said first protein or said second protein fused to an amino acid sequence different from the first protein or second protein, respectively.

6. The complex of No. 5 wherein the functionally active derivative is a fusion protein comprising said first protein or said second protein fused to an affinity tag or label.

7. The complex of any of No. 1-4 comprising a fragment of said first protein and/or a fragment of said second protein, which fragment binds to another protein component of said complex.

[1657] 8. The complex of any of No. 1-7 that is involved in the the production of Abeta-40 and Abeta-42 peptides by ELISA (e.g. by modifying the expression of one or several interacting proteins in cells by means of RNAi (siRNA) and/or plasmids encoding the interacting protein(s)), the production of C-terminal APP fragments in cell lines or transgenic animals by western blot (e.g. by modifying the expression of one or several interacting proteins in cells by means of RNAi (siRNA) and/or plasmids encoding the interacting protein(s)), the proteolytic activity of beta- or gamma secretases towards bacterially expressed APP fragments in vitro (e.g. by modifying the expression of one or several interacting proteins in cells by means of RNAi (siRNA) and/or plasmids encoding the interacting protein(s)) or transactivation of a Gal4-driven reporter gene (e.g. by modifying the expression of one or several interacting proteins in cells by means of RNAi (siRNA) and/or plasmids encoding the interacting protein(s)).

[1658] 9. A process for preparing a complex of any of No. 1-8 and optionally the components thereof comprising the following steps: expressing a protein (bait) of the complex, preferably a tagged protein, in a target cell, isolating the protein complex which is attached to the bait protein, and optionally dissociating the protein complex and isolating the individual complex members.

10. The process according to No. 9 wherein the tagged protein comprises two different tags which allow two separate affinity purification steps.

11. The process according to any of No. 9-10 wherein the two tags are separated by a cleavage site for a protease.

12. Component of the BACE1 complex obtainable by a process according to any of No. 9-11.

13. Protein of the BACE1 complex selected from

[1659] (i) “Cadherin EGF LAG seven-pass G-type receptor 2” (SEQ ID No:35) or a functionally active derivative thereof, or a functionally active fragment thereof, or a homolog thereof, or a variant of “Cadherin EGF LAG seven-pass G-type receptor 2” encoded by a nucleic acid that hybridizes to the “Cadherin EGF LAG seven-pass G-type receptor 2” nucleic acid or its complement under low stringency conditions,

[1660] (ii) “FLJ30668” (SEQ ID No:69) or a functionally active derivative thereof, or a functionally active fragment thereof, or a homolog thereof, or a variant of “FLJ30668” encoded by a nucleic acid that hybridizes to the “FLJ30668” nucleic acid or its complement under low stringency conditions,

[1661] (iii) “FLJ39249” (SEQ ID No:71) or a functionally active derivative thereof, or a functionally active fragment thereof, or a homolog thereof, or a variant of “FLJ39249” encoded by a nucleic acid that hybridizes to the “FLJ39249” nucleic acid or its complement under low stringency conditions,

[1662] (iv) “KIAA1250” (SEQ ID No:107) or a functionally active derivative thereof, or a functionally active fragment thereof, or a homolog thereof, or a variant of “KIAA1250” encoded by a nucleic acid that hybridizes to the “KIAA1250” nucleic acid or its complement under low stringency conditions,

[1663] (v) “SIM TO Y71H10A, 2.P” (SEQ ID No:85) or a functionally active derivative thereof, or a functionally active fragment thereof, or a homolog thereof, or a variant of “SIM TO Y71H10A. 2.P” encoded by a nucleic acid that hybridizes to the “SIM TO Y71H10A. 2.P” nucleic acid or its complement under low stringency conditions, and

[1664] (vi) “Thioredoxin domain-containing protein” (SEQ ID No:101) or a functionally active derivative thereof, or a functionally active fragment thereof, or a homolog thereof, or a variant of “Thioredoxin domain-containing protein” encoded by a nucleic acid that hybridizes to the “Thioredoxin domain-containing protein” nucleic acid or its complement under low stringency conditions, wherein said low stringency conditions comprise hybridization in a buffer comprising 35% formamide, 5×SSC, 50 mM Tris-HCI (pH 7.5), 5 mM EDTA, 0.02% PVP, 0.02% Ficoll, 0.2% BSA, 100 ug/ml denatured salmon sperm DNA, and 10% (wt/vol) dextran sulfate for 18-20 hours at 40 Celsius, washing in a buffer consisting of 2×SSC, 25 mM Tris-HCI (pH 7.4), 5 mM EDTA, and 0.1% SDS for 1.5 hours at 55 Celsius, and washing in a buffer consisting of 2×SSC, 25 mM Tris-HCI (pH 7.4), 5 mM EDTA, and 0.1% SDS for 1.5 hours at 60 Celsius.

14. Nucleic acid encoding a protein according to No. 13.

15. Construct, preferably a vector construct, comprising (a) a nucleic acid according to No. 14 and at least one further nucleic acid which is normally not associated with said nucleic acid, or

[1665] (b) at least two separate nucleic acid sequences each encoding a different protein, or a functionally active fragment or a functionally active derivative of at least one of said proteins, or functionally active fragments or functionally active derivative thereof being selected from the first group of proteins according to No. 1 (a) and at least one of said proteins, or functionally active fragments or functionally active derivative thereof being selected from the second group of proteins according to No. 1 (b).

[1666] 16. Host cell, containing a vector comprising at least one of the nucleic acid of No. 14 and/or a construct of No. 15 or containing several vectors each comprising at least the nucleic acid sequence encoding at least one of the proteins, or functionally active fragments or functionally active derivatives thereof selected from the first group of proteins according to No. 1 (a) and the proteins, or functionally active fragments or functionally active derivatives thereof selected from the second group of proteins according to No. 1 (b).

[1667] 17. An antibody or a fragment of said antibody containing the binding domain thereof, selected from an antibody or fragment thereof, which binds the complex of any of No. 1-8 and which does not bind any of the proteins of said complex when uncomplexed and an antibody or a fragment of said antibody which binds to any of the proteins according to No. 13.

18. A kit comprising in one or more container the complex of any of No. 1-8 and/or the proteins of No. 13 optionally together with an antibody according to No. 17 and/or further components such as reagents and working instructions.

19. The kit according to No. 18 for processing a substrate of said complex.

20. The kit according to No. 18 for the diagnosis or prognosis of a disease or a disease risk, preferentially for a disease or disorder such as neurodegenerative diseases such as Alzheimer's disease and related neurodegenerative disorders.

21. Array, in which at least a complex according to any of No. 1-8 and/or at least one protein according to No. 14 and/or at least one antibody according to No. 17 is attached to a solid carrier.

22. A process for processing a physiological substrate of the complex comprising the step of bringing into contact a complex to any of No. 1-8 with said substrate, such that said substrate is processed.

23. A pharmaceutical composition comprising the protein complex of any of No. 1-8 and/or any of the following the proteins:

[1668] (i) “Cadherin EGF LAG seven-pass G-type receptor 2” (SEQ ID No:35) or a functionally active derivative thereof, or a functionally active fragment thereof, or a homolog thereof, or a variant of “Cadherin EGF LAG seven-pass G-type receptor 2” encoded by a nucleic acid that hybridizes to the “Cadherin EGF LAG seven-pass G-type receptor 2” nucleic acid or its complement under low stringency conditions,

[1669] (ii) “FLJ30668” (SEQ ID No:69) or a functionally active derivative thereof, or a functionally active fragment thereof, or a homolog thereof, or a variant of “FLJ30668” encoded by a nucleic acid that hybridizes to the “FLJ30668” nucleic acid or its complement under low stringency conditions,

[1670] (iii) “FLJ39249” (SEQ ID No:71) or a functionally active derivative thereof, or a functionally active fragment thereof, or a homolog thereof, or a variant of “FLJ39249” encoded by a nucleic acid that hybridizes to the “FLJ39249” nucleic acid or its complement under low stringency conditions,

[1671] (iv) “KIAA1250” (SEQ ID No:107) or a functionally active derivative thereof, or a functionally active fragment thereof, or a homolog thereof, or a variant of “KIAA1250” encoded by a nucleic acid that hybridizes to the “KIAA1250” nucleic acid or its complement under low stringency conditions,

[1672] (v) “SIM TO Y71H10A. 2.P” (SEQ ID No:85) or a functionally active derivative thereof, or a functionally active fragment thereof, or a homolog thereof, or a variant of “SIM TO Y71H10A. 2.P” encoded by a nucleic acid that hybridizes to the “SIM TO Y71H10A. 2.P” nucleic acid or its complement under low stringency conditions, and/or

[1673] (vi) “Thioredoxin domain-containing protein” (SEQ ID No:101) or a functionally active derivative thereof, or a functionally active fragment thereof, or a homolog thereof, or a variant of “Thioredoxin domain-containing protein” encoded by a nucleic acid that hybridizes to the “Thioredoxin domain-containing protein” nucleic acid or its complement under low stringency conditions, and a pharmaceutical acceptable carrier.

24. A pharmaceutical composition according to No. 23 for the treatment of diseases and disorders such as neurodegenerative diseases such as Alzheimer's disease and related neurodegenerative disorders.

25. A method for screening for a molecule that binds to the complex of anyone of No. 1-8 and/or any of the following the proteins:

[1674] (i) “Cadherin EGF LAG seven-pass G-type receptor 2” (SEQ ID No:35) or a functionally active derivative thereof, or a functionally active fragment thereof, or a homolog thereof, or a variant of “Cadherin EGF LAG seven-pass G-type receptor 2” encoded by a nucleic acid that hybridizes to the “Cadherin EGF LAG seven-pass G-type receptor 2” nucleic acid or its complement under low stringency conditions,

[1675] (ii) “FLJ30668” (SEQ ID No:69) or a functionally active derivative thereof, or a functionally active fragment thereof, or a homolog thereof, or a variant of “FLJ30668” encoded by a nucleic acid that hybridizes to the “FLJ30668” nucleic acid or its complement under low stringency conditions,

[1676] (iii) “FLJ39249” (SEQ ID No:71) or a functionally active derivative thereof, or a functionally active fragment thereof, or a homolog thereof, or a variant of “FLJ39249” encoded by a nucleic acid that hybridizes to the “FLJ39249” nucleic acid or its complement under low stringency conditions,

[1677] (iv) “KIAA1250” (SEQ ID No:107) or a functionally active derivative thereof, or a functionally active fragment thereof, or a homolog thereof, or a variant of “KIAA1250” encoded by a nucleic acid that hybridizes to the “KIAA1250” nucleic acid or its complement under low stringency conditions,

[1678] (v) “SIM TO Y71H10A. 2.P” (SEQ ID No:85) or a functionally active derivative thereof, or a functionally active fragment thereof, or a homolog thereof, or a variant of “SIM TO Y71H10A. 2.P” encoded by a nucleic acid that hybridizes to the “SIM TO Y71H10A. 2.P” nucleic acid or its complement under low stringency conditions, and/or

[1679] (vi) “Thioredoxin domain-containing protein” (SEQ ID No:101) or a functionally active derivative thereof, or a functionally active fragment thereof, or a homolog thereof, or a variant of “Thioredoxin domain-containing protein” encoded by a nucleic acid that hybridizes to the “Thioredoxin domain-containing protein” nucleic acid or its complement under low stringency conditions, comprising the steps of

(a) exposing said complex, or a cell or organism containing same to one or more candidate molecules; and

(b) determining whether said candidate molecule is bound to the complex or protein.

[1680] 26. A method for screening for a molecule that modulates directly or indirectly the function, activity, composition or formation of the complex of any one of No. 1-8 comprising the steps of (a) exposing said complex, or a cell or organism containing BACE1 complex to one or more candidate molecules; and

[1681] (b) determining the amount of activity of protein components of, and/or intracellular localization of, said complex and/or the transcription level of a gene dependent on the complex and/or the abundance and/or activity of a protein or protein complex dependent on the function of the complex and/or product of a gene dependent on the complex in the presence of the one or more candidate molecules, wherein a change in said amount, activity, protein components or intracellular localization relative to said amount, activity, protein components and/or intracellular localization and/or a change in the transcription level of a gene dependent on the complex and/or the abundance and/or activity of a protein or protein complex dependent on the function of the complex and/or product of a gene dependent on the complex in the absence of said candidate molecules indicates that the molecule modulates function, activity or composition of said complex.

27. The method of No. 26, wherein the amount of said complex is determined.

28. The method of No. 26, wherein the activity of said complex is determined.

[1682] 29. The method of No. 28, wherein said determining step comprises isolating from the cell or organism said complex to produce said isolated complex and contacting said isolated complex in the presence or absence of a candidate molecule with a substrate of said complex and determining the processing of said substrate is modified in the presence of said candidate molecule.

30. The method of No. 26, wherein the amount of the individual protein components of said complex are determined.

31. The method of No. 30, wherein said determining step comprises determining whether

[1683] (i) “BACE1” (SEQ ID No:38) or a functionally active derivative thereof, or a functionally active fragment thereof, or a homolog thereof, or a variant of “BACE1” encoded by a nucleic acid that hybridizes to the “BACE1” nucleic acid or its complement under low stringency conditions, and/or

[1684] (ii) “CGI-13” (SEQ ID No:72) or a functionally active derivative thereof, or a functionally active fragment thereof, or a homolog thereof, or a variant of “CGI-13” encoded by a nucleic acid that hybridizes to the “CGI-13” nucleic acid or its complement under low stringency conditions, and/or

[1685] (iii) “Cadherin EGF LAG seven-pass G-type receptor 2” (SEQ ID No:35) or a functionally active derivative thereof, or a functionally active fragment thereof, or a homolog thereof, or a variant of “Cadherin EGF LAG seven-pass G-type receptor 2” encoded by a nucleic acid that hybridizes to the “Cadherin EGF LAG seven-pass G-type receptor 2” nucleic acid or its complement under low stringency conditions, and/or

[1686] (iv) “Calsyntenin 1” (SEQ ID No:36) or a functionally active derivative thereof, or a functionally active fragment thereof, or a homolog thereof, or a variant of “Calsyntenin 1” encoded by a nucleic acid that hybridizes to the “Calsyntenin 1” nucleic acid or its complement under low stringency conditions, and/or

[1687] (v) “Delta-6 fatty acid desaturase” (SEQ ID No:76) or a functionally active derivative thereof, or a functionally active fragment thereof, or a homolog thereof, or a variant of “Delta-6 fatty acid desaturase” encoded by a nucleic acid that hybridizes to the “Delta-6 fatty acid desaturase” nucleic acid or its complement under low stringency conditions, and/or

[1688] (vi) “Delta-like homolog” (SEQ ID No:118) or a functionally active derivative thereof, or a functionally active fragment thereof, or a homolog thereof, or a variant of “Delta-like homolog” encoded by a nucleic acid that hybridizes to the “Delta-like homolog” nucleic acid or its complement under low stringency conditions, and/or

[1689] (vii) “FLJ30668” (SEQ ID No:69) or a functionally active derivative thereof, or a functionally active fragment thereof, or a homolog thereof, or a variant of “FLJ30668” encoded by a nucleic acid that hybridizes to the “FLJ30668” nucleic acid or its complement under low stringency conditions, and/or

[1690] (viii) “FLJ39249” (SEQ ID No:71) or a functionally active derivative thereof, or a functionally active fragment thereof, or a homolog thereof, or a variant of “FLJ39249” encoded by a nucleic acid that hybridizes to the “FLJ39249” nucleic acid or its complement under low stringency conditions, and/or

[1691] (ix) “ITCH” (SEQ ID No:73) or a functionally active derivative thereof, or a functionally active fragment thereof, or a homolog thereof, or a variant of “ITCH” encoded by a nucleic acid that hybridizes to the “ITCH” nucleic acid or its complement under low stringency conditions, and/or

[1692] (x) “KIAA1250” (SEQ ID No:107) or a functionally active derivative thereof, or a functionally active fragment thereof, or a homolog thereof, or a variant of “KIAA1250” encoded by a nucleic acid that hybridizes to the “KIAA1250” nucleic acid or its complement under low stringency conditions, and/or

[1693] (xi) “Nicastrin” (SEQ ID No:9) or a functionally active derivative thereof, or a functionally active fragment thereof, or a homolog thereof, or a variant of “Nicastrin” encoded by a nucleic acid that hybridizes to the “Nicastrin” nucleic acid or its complement under low stringency conditions, and/or

[1694] (xii) “Nogo-A” (SEQ ID No:77) or a functionally active derivative thereof, or a functionally active fragment thereof, or a homolog thereof, or a variant of “Nogo-A” encoded by a nucleic acid that hybridizes to the “Nogo-A” nucleic acid or its complement under low stringency conditions, and/or

[1695] (xiii) “PDGFRB” (SEQ ID No:78) or a functionally active derivative thereof, or a functionally active fragment thereof, or a homolog thereof, or a variant of “PDGFRB” encoded by a nucleic acid that hybridizes to the “PDGFRB” nucleic acid or its complement under low stringency conditions, and/or

[1696] (xiv) “PTK7” (SEQ ID No:80) or a functionally active derivative thereof, or a functionally active fragment thereof, or a homolog thereof, or a variant of “PTK7” encoded by a nucleic acid that hybridizes to the “PTK7” nucleic acid or its complement under low stringency conditions, and/or

[1697] (xv) “SERPINA1” (SEQ ID No:83) or a functionally active derivative thereof, or a functionally active fragment thereof, or a homolog thereof, or a variant of “SERPINA1” encoded by a nucleic acid that hybridizes to the “SERPINA1” nucleic acid or its complement under low stringency conditions, and/or

[1698] (xvi) “SIM TO Y71H10A. 2.P” (SEQ ID No:85) or a functionally active derivative thereof, or a functionally active fragment thereof, or a homolog thereof, or a variant of “SIM TO Y71H10A. 2.P” encoded by a nucleic acid that hybridizes to the “SIM TO Y71H10A. 2.P” nucleic acid or its complement under low stringency conditions, and/or

[1699] (xvii) “STX10” (SEQ ID No:65) or a functionally active derivative thereof, or a functionally active fragment thereof, or a homolog thereof, or a variant of “STX10” encoded by a nucleic acid that hybridizes to the “STX10” nucleic acid or its complement under low stringency conditions, and/or

[1700] (xviii) “Sortilin-related receptor” (SEQ ID No:52) or a functionally active derivative thereof, or a functionally active fragment thereof, or a homolog thereof, or a variant of “Sortilin-related receptor” encoded by a nucleic acid that hybridizes to the “Sortilin-related receptor” nucleic acid or its complement under low stringency conditions, and/or

[1701] (xix) “Thioredoxin domain-containing protein” (SEQ ID No:101) or a functionally active derivative thereof, or a functionally active fragment thereof, or a homolog thereof, or a variant of “Thioredoxin domain-containing protein” encoded by a nucleic acid that hybridizes to the “Thioredoxin domain-containing protein” nucleic acid or its complement under low stringency conditions, and/or

[1702] (xx) “integral membrane transporter protein” (SEQ ID No:114) or a functionally active derivative thereof, or a functionally active fragment thereof, or a homolog thereof, or a variant of “integral membrane transporter protein” encoded by a nucleic acid that hybridizes to the “integral membrane transporter protein” nucleic acid or its complement under low stringency conditions, and/or

[1703] (xxi) “kinectin 1 (kinesin receptor)” (SEQ ID No:90) or a functionally active derivative thereof, or a functionally active fragment thereof, or a homolog thereof, or a variant of “kinectin 1 (kinesin receptor)” encoded by a nucleic acid that hybridizes to the “kinectin 1 (kinesin receptor)” nucleic acid or its complement under low stringency conditions, is present in the complex.

32. The method of any of No. 26-31, wherein said method is a method of screening for a drug for treatment or prevention of a disease or disorder such as neurodegenerative diseases such as Alzheimer's disease and related neurodegenerative disorders.

[1704] 33. Use of a molecule that modulates the amount of, activity of, or the protein components of the complex of any one of No. 1-8 for the manufacture of a medicament for the treatment or prevention of a disease or disorder such as neurodegenerative diseases such as Alzheimer's disease and related neurodegenerative disorders.

[1705] 34. A method for the production of a pharmaceutical composition comprising carrying out the method of any of No. 1-8 to identify a molecule that modulates the function, activity, composition or formation of said complex, and further comprising mixing the identified molecule with a pharmaceutically acceptable carrier.

[1706] 35. A method for diagnosing or screening for the presence of a disease or disorder or a predisposition for developing a disease or disorder in a subject, which disease or disorder is characterized by an aberrant amount of, activity of, or component composition of, or intracellular localization of the complex of any one of the No. 1-8, comprising determining the amount of, activity of, protein components of, and/or intracellular localization of, said complex and/or the transcription level of a gene dependent on the complex and/or the abundance and/or activity of a protein or protein complex dependent on the function of the complex and/or product of a gene dependent on the complex in a comparative sample derived from a subject, wherein a difference in said amount, activity, or protein components of, said complex in an analogous sample from a subject not having the disease or disorder or predisposition indicates the presence in the subject of the disease or disorder or predisposition in the subject.

36. The method of No. 35, wherein the amount of said complex is determined.

37. The method of No. 35, wherein the activity of said complex is determined.

[1707] 38. The method of No. 37, wherein said determining step comprises isolating from the subject said complex to produce said isolated complex and contacting said isolated complex in the presence or absence of a candidate molecule with a substrate of said complex and determining whether said substrate is processed in the absence of the candidate molecule and whether the processing of said substrate is modified in the presence of said candidate molecule.

39. The method of No. 35, wherein the amount of the individual protein components of said complex is determined.

40. The method of No. 39, wherein said determining step comprises determining whether

[1708] (i) “BACE1” (SEQ ID No:38) or a functionally active derivative thereof, or a functionally active fragment thereof, or a homolog thereof, or a variant of “BACE1” encoded by a nucleic acid that hybridizes to the “BACE1” nucleic acid or its complement under low stringency conditions, and/or

[1709] (ii) “CGI-13” (SEQ ID No:72) or a functionally active derivative thereof, or a functionally active fragment thereof, or a homolog thereof, or a variant of “CGI-13” encoded by a nucleic acid that hybridizes to the “CGI-13” nucleic acid or its complement under low stringency conditions, and/or

[1710] (iii) “Cadherin EGF LAG seven-pass G-type receptor 2” (SEQ ID No:35) or a functionally active derivative thereof, or a functionally active fragment thereof, or a homolog thereof, or a variant of “Cadherin EGF LAG seven-pass G-type receptor 2” encoded by a nucleic acid that hybridizes to the “Cadherin EGF LAG seven-pass G-type receptor 2” nucleic acid or its complement under low stringency conditions, and/or

[1711] (iv) “Calsyntenin 1” (SEQ ID No:36) or a functionally active derivative thereof, or a functionally active fragment thereof, or a homolog thereof, or a variant of “Calsyntenin 1” encoded by a nucleic acid that hybridizes to the “Calsyntenin 1” nucleic acid or its complement under low stringency conditions, and/or

[1712] (v) “Delta-6 fatty acid desaturase” (SEQ ID No:76) or a functionally active derivative thereof, or a functionally active fragment thereof, or a homolog thereof, or a variant of “Delta-6 fatty acid desaturase” encoded by a nucleic acid that hybridizes to the “Delta-6 fatty acid desaturase” nucleic acid or its complement under low stringency conditions, and/or

[1713] (vi) “Delta-like homolog” (SEQ ID No:118) or a functionally active derivative thereof, or a functionally active fragment thereof, or a homolog thereof, or a variant of “Delta-like homolog” encoded by a nucleic acid that hybridizes to the “Delta-like homolog” nucleic acid or its complement under low stringency conditions, and/or

[1714] (vii) “FLJ30668” (SEQ ID No:69) or a functionally active derivative thereof, or a functionally active fragment thereof, or a homolog thereof, or a variant of “FLJ30668” encoded by a nucleic acid that hybridizes to the “FLJ30668” nucleic acid or its complement under low stringency conditions, and/or

[1715] (viii) “FLJ39249” (SEQ ID No:71) or a functionally active derivative thereof, or a functionally active fragment thereof, or a homolog thereof, or a variant of “FLJ39249” encoded by a nucleic acid that hybridizes to the “FLJ39249” nucleic acid or its complement under low stringency conditions, and/or

[1716] (ix) “ITCH” (SEQ ID No:73) or a functionally active derivative thereof, or a functionally active fragment thereof, or a homolog thereof, or a variant of “ITCH” encoded by a nucleic acid that hybridizes to the “ITCH” nucleic acid or its complement under low stringency conditions, and/or

[1717] (x) “KIAA1250” (SEQ ID No:107) or a functionally active derivative thereof, or a functionally active fragment thereof, or a homolog thereof, or a variant of “KIAA1250” encoded by a nucleic acid that hybridizes to the “KIAA1250” nucleic acid or its complement under low stringency conditions, and/or

[1718] (xi) “Nicastrin” (SEQ ID No:9) or a functionally active derivative thereof, or a functionally active fragment thereof, or a homolog thereof, or a variant of “Nicastrin” encoded by a nucleic acid that hybridizes to the “Nicastrin” nucleic acid or its complement under low stringency conditions, and/or

[1719] (xii) “Nogo-A” (SEQ ID No:77) or a functionally active derivative thereof, or a functionally active fragment thereof, or a homolog thereof, or a variant of “Nogo-A” encoded by a nucleic acid that hybridizes to the “Nogo-A” nucleic acid or its complement under low stringency conditions, and/or

[1720] (xiii) “PDGFRB” (SEQ ID No:78) or a functionally active derivative thereof, or a functionally active fragment thereof, or a homolog thereof, or a variant of “PDGFRB” encoded by a nucleic acid that hybridizes to the “PDGFRB” nucleic acid or its complement under low stringency conditions, and/or

[1721] (xiv) “PTK7” (SEQ ID No:80) or a functionally active derivative thereof, or a functionally active fragment thereof, or a homolog thereof, or a variant of “PTK7” encoded by a nucleic acid that hybridizes to the “PTK7” nucleic acid or its complement under low stringency conditions, and/or

[1722] (xv) “SERPINA1” (SEQ ID No:83) or a functionally active derivative thereof or a functionally active fragment thereof, or a homolog thereof, or a variant of “SERPINA1” encoded by a nucleic acid that hybridizes to the “SERPINA1” nucleic acid or its complement under low stringency conditions, and/or

[1723] (xvi) “SIM TO Y71H10A. 2.P” (SEQ ID No:85) or a functionally active derivative thereof, or a functionally active fragment thereof, or a homolog thereof, or a variant of “SIM TO Y71H10A. 2.P” encoded by a nucleic acid that hybridizes to the “SIM TO Y71H10A. 2.P” nucleic acid or its complement under low stringency conditions, and/or

[1724] (xvii) “STX10” (SEQ ID No:65) or a functionally active derivative thereof, or a functionally active fragment thereof, or a homolog thereof, or a variant of “STX10” encoded by a nucleic acid that hybridizes to the “STX10” nucleic acid or its complement under low stringency conditions, and/or

[1725] (xviii) “Sortilin-related receptor” (SEQ ID No:52) or a functionally active derivative thereof, or a functionally active fragment thereof, or a homolog thereof, or a variant of “Sortilin-related receptor” encoded by a nucleic acid that hybridizes to the “Sortilin-related receptor” nucleic acid or its complement under low stringency conditions, and/or

[1726] (xix) “Thioredoxin domain-containing protein” (SEQ ID No:101) or a functionally active derivative thereof, or a functionally active fragment thereof, or a homolog thereof, or a variant of “Thioredoxin domain-containing protein” encoded by a nucleic acid that hybridizes to the “Thioredoxin domain-containing protein” nucleic acid or its complement under low stringency conditions, and/or

[1727] (xx) “integral membrane transporter protein” (SEQ ID No:114) or a functionally active derivative thereof, or a functionally active fragment thereof, or a homolog thereof, or a variant of “integral membrane transporter protein” encoded by a nucleic acid that hybridizes to the “integral membrane transporter protein” nucleic acid or its complement under low stringency conditions, and/or

[1728] (xxi) “kinectin 1 (kinesin receptor)” (SEQ ID No:90) or a functionally active derivative thereof, or a functionally active fragment thereof, or a homolog thereof, or a variant of “kinectin 1 (kinesin receptor)” encoded by a nucleic acid that hybridizes to the “kinectin 1 (kinesin receptor)” nucleic acid or its complement under low stringency conditions, is present in the complex.

[1729] 41. The complex of any one of No. 1-8, or proteins of No. 13 or the antibody or fragment of No. 17, for use in a method of diagnosing a disease or disorder such as neurodegenerative diseases such as Alzheimer's disease and related neurodegenerative disorders.

[1730] 42. A method for treating or preventing a disease or disorder characterized by an aberrant amount of, activity or component composition of or intracellular localization of, the complex of anyone of No. 1-8, comprising administering to a subject in need of such treatment or prevention a therapeutically effective amount of one or more molecules that modulate the amount of, the production of Abeta-40 and Abeta-42 peptides by ELISA (e.g. by modifying the expression of one or several interacting proteins in cells by means of RNAi (siRNA) and/or plasmids encoding the interacting protein(s)), the production of C-terminal APP fragments in cell lines or transgenic animals by western blot (e.g. by modifying the expression of one or several interacting proteins in cells by means of RNAi (siRNA) and/or plasmids encoding the interacting protein(s)), the proteolytic activity of beta- or gamma secretases towards bacterially expressed APP fragments in vitro (e.g. by modifying the expression of one or several interacting proteins in cells by means of RNAi (siRNA) and/or plasmids encoding the interacting protein(s)) or transactivation of a Gal4-driven reporter gene (e.g. by modifying the expression of one or several interacting proteins in cells by means of RNAi (siRNA) and/or plasmids encoding the interacting protein(s)), or protein components of, said complex.

43. The method according to No. 42, wherein said disease or disorder involves decreased levels of the amount or activity of said complex.

44. The method according to No. 42, wherein said disease or disorder involves increased levels of the amount or activity of said complex.

45. Complex of any of No. 1-8 and/or protein selected from the following proteins

[1731] (i) “BACE1” (SEQ ID No:38) or a functionally active derivative thereof, or a functionally active fragment thereof, or a homolog thereof, or a variant of “BACE1” encoded by a nucleic acid that hybridizes to the “BACE1” nucleic acid or its complement under low stringency conditions,

[1732] (ii) “CGI-13” (SEQ ID No:72) or a functionally active derivative thereof, or a functionally active fragment thereof, or a homolog thereof, or a variant of “CGI-13” encoded by a nucleic acid that hybridizes to the “CGI-13” nucleic acid or its complement under low stringency conditions,

[1733] (iii) “Cadherin EGF LAG seven-pass G-type receptor 2” (SEQ ID No:35) or a functionally active derivative thereof, or a functionally active fragment thereof, or a homolog thereof, or a variant of “Cadherin EGF LAG seven-pass G-type receptor 2” encoded by a nucleic acid that hybridizes to the “Cadherin EGF LAG seven-pass G-type receptor 2” nucleic acid or its complement under low stringency conditions,

[1734] (iv) “Calsyntenin 1” (SEQ ID No:36) or a functionally active derivative thereof, or a functionally active fragment thereof, or a homolog thereof, or a variant of “Calsyntenin 1” encoded by a nucleic acid that hybridizes to the “Calsyntenin 1” nucleic acid or its complement under low stringency conditions,

[1735] (v) “Delta-6 fatty acid desaturase” (SEQ ID No:76) or a functionally active derivative thereof, or a functionally active fragment thereof, or a homolog thereof, or a variant of “Delta-6 fatty acid desaturase” encoded by a nucleic acid that hybridizes to the “Delta-6 fatty acid desaturase” nucleic acid or its complement under low stringency conditions,

[1736] (vi) “Delta-like homolog” (SEQ ID No:118) or a functionally active derivative thereof, or a functionally active fragment thereof, or a homolog thereof, or a variant of “Delta-like homolog” encoded by a nucleic acid that hybridizes to the “Delta-like homolog” nucleic acid or its complement under low stringency conditions,

[1737] (vii) “FLJ30668” (SEQ ID No:69) or a functionally active derivative thereof, or a functionally active fragment thereof, or a homolog thereof, or a variant of “FLJ30668” encoded by a nucleic acid that hybridizes to the “FLJ30668” nucleic acid or its complement under low stringency conditions,

[1738] (viii) “FLJ39249” (SEQ ID No:71) or a functionally active derivative thereof, or a functionally active fragment thereof, or a homolog thereof, or a variant of “FLJ39249” encoded by a nucleic acid that hybridizes to the “FLJ39249” nucleic acid or its complement under low stringency conditions,

[1739] (ix) “ITCH” (SEQ ID No:73) or a functionally active derivative thereof, or a functionally active fragment thereof, or a homolog thereof, or a variant of “ITCH” encoded by a nucleic acid that hybridizes to the “ITCH” nucleic acid or its complement under low stringency conditions,

[1740] (x) “KIAA1250” (SEQ ID No:107) or a functionally active derivative thereof, or a functionally active fragment thereof, or a homolog thereof, or a variant of “KIAA1250” encoded by a nucleic acid that hybridizes to the “KIAA1250” nucleic acid or its complement under low stringency conditions,

[1741] (xi) “Nicastrin” (SEQ ID No:9) or a functionally active derivative thereof, or a functionally active fragment thereof, or a homolog thereof, or a variant of “Nicastrin” encoded by a nucleic acid that hybridizes to the “Nicastrin” nucleic acid or its complement under low stringency conditions,

[1742] (xii) “Nogo-A” (SEQ ID No:77) or a functionally active derivative thereof, or a functionally active fragment thereof, or a homolog thereof, or a variant of “Nogo-A” encoded by a nucleic acid that hybridizes to the “Nogo-A” nucleic acid or its complement under low stringency conditions,

[1743] (xiii) “PDGFRB” (SEQ ID No:78) or a functionally active derivative thereof, or a functionally active fragment thereof, or a homolog thereof, or a variant of “PDGFRB” encoded by a nucleic acid that hybridizes to the “PDGFRB” nucleic acid or its complement under low stringency conditions,

[1744] (xiv) “PTK7” (SEQ ID No:80) or a functionally active derivative thereof, or a functionally active fragment thereof, or a homolog thereof, or a variant of “PTK7” encoded by a nucleic acid that hybridizes to the “PTK7” nucleic acid or its complement under low stringency conditions,

[1745] (xv) “SERPINA1” (SEQ ID No:83) or a functionally active derivative thereof, or a functionally active fragment thereof, or a homolog thereof, or a variant of “SERPINA1” encoded by a nucleic acid that hybridizes to the “SERPINA1” nucleic acid or its complement under low stringency conditions,

[1746] (xvi) “SIM TO Y71H10A. 2.P” (SEQ ID No:85) or a functionally active derivative thereof, or a functionally active fragment thereof, or a homolog thereof, or a variant of “SIM TO Y71H10A. 2.P” encoded by a nucleic acid that hybridizes to the “SIM TO Y71H10A. 2.P” nucleic acid or its complement under low stringency conditions,

[1747] (xvii) “STX10” (SEQ ID No:65) or a functionally active derivative thereof, or a functionally active fragment thereof, or a homolog thereof, or a variant of “STX10” encoded by a nucleic acid that hybridizes to the “STX10” nucleic acid or its complement under low stringency conditions,

[1748] (xviii) “Sortilin-related receptor” (SEQ ID No:52) or a functionally active derivative thereof, or a functionally active fragment thereof, or a homolog thereof, or a variant of “Sortilin-related receptor” encoded by a nucleic acid that hybridizes to the “Sortilin-related receptor” nucleic acid or its complement under low stringency conditions,

[1749] (xix) “Thioredoxin domain-containing protein” (SEQ ID No:101) or a functionally active derivative thereof, or a functionally active fragment thereof, or a homolog thereof, or a variant of “Thioredoxin domain-containing protein” encoded by a nucleic acid that hybridizes to the “Thioredoxin domain-containing protein” nucleic acid or its complement under low stringency conditions,

[1750] (xx) “integral membrane transporter protein” (SEQ ID No:114) or a functionally active derivative thereof, or a functionally active fragment thereof, or a homolog thereof, or a variant of “integral membrane transporter protein” encoded by a nucleic acid that hybridizes to the “integral membrane transporter protein” nucleic acid or its complement under low stringency conditions, and/or (xxi) “kinectin 1 (kinesin receptor)” (SEQ ID No:90) or a functionally active derivative thereof, or a functionally active fragment thereof, or a homolog thereof, or a variant of “kinectin 1 (kinesin receptor)” encoded by a nucleic acid that hybridizes to the “kinectin 1 (kinesin receptor)” nucleic acid or its complement under low stringency conditions, as a target for an active agent of a pharmaceutical, preferably a drug target in the treatment or prevention of a disease or disorder such as neurodegenerative diseases such as Alzheimer's disease and related neurodegenerative disorders.

[1751] Furthermore, the present invention relates to the BACE1-complex (b)

1. A protein complex selected from complex (not defined) and comprising

(a) at least one first protein selected from the group consisting of:

[1752] (i) “BACE1” (SEQ ID No:38) or a functionally active derivative thereof, or a functionally active fragment thereof, or a homolog thereof, or a variant of “BACE1” encoded by a nucleic acid that hybridizes to the “BACE1” nucleic acid or its complement under low stringency conditions,

[1753] (ii) “APP” (SEQ ID No:23) or a functionally active derivative thereof, or a functionally active fragment thereof, or a homolog thereof, or a variant of “APP” encoded by a nucleic acid that hybridizes to the “APP” nucleic acid or its complement under low stringency conditions,

[1754] (iii) “Nicastrin” (SEQ ID No:9) or a functionally active derivative thereof, or a functionally active fragment thereof, or a homolog thereof, or a variant of “Nicastrin” encoded by a nucleic acid that hybridizes to the “Nicastrin” nucleic acid or its complement under low stringency conditions, and

(b) at least one first protein selected from the group consisting of:

[1755] (i) “ACAT1” (SEQ ID No:4) or a functionally active derivative thereof, or a functionally active fragment thereof, or a homolog thereof, or a variant of “ACAT1” encoded by a nucleic acid that hybridizes to the “ACAT1” nucleic acid or its complement under low stringency conditions,

[1756] (ii) “APLP2” (SEQ ID No:22) or a functionally active derivative thereof, or a functionally active fragment thereof, or a homolog thereof, or a variant of “APLP2” encoded by a nucleic acid that hybridizes to the “APLP2” nucleic acid or its complement under low stringency conditions,

[1757] (iii) “BRI” (SEQ ID No:5) or a functionally active derivative thereof, or a functionally active fragment thereof, or a homolog thereof, or a variant of “BRI” encoded by a nucleic acid that hybridizes to the “BRI” nucleic acid or its complement under low stringency conditions,

[1758] (iv) “calsyntenin 1” (SEQ ID No:6) or a functionally active derivative thereof, or a functionally active fragment thereof, or a homolog thereof, or a variant of “calsyntenin 1” encoded by a nucleic acid that hybridizes to the “calsyntenin 1” nucleic acid or its complement under low stringency conditions,

[1759] (v) “CELSR2” (SEQ ID No:39) or a functionally active derivative thereof, or a functionally active fragment thereof, or a homolog thereof, or a variant of “CELSR2” encoded by a nucleic acid that hybridizes to the “CELSR2” nucleic acid or its complement under low stringency conditions,

[1760] (vi) “CGI-13” (SEQ ID No:72) or a functionally active derivative thereof, or a functionally active fragment thereof, or a homolog thereof, or a variant of “CGI-13” encoded by a nucleic acid that hybridizes to the “CGI-13” nucleic acid or its complement under low stringency conditions,

[1761] (vii) “DLK1” (SEQ ID No:7) or a functionally active derivative thereof, or a functionally active fragment thereof, or a homolog thereof, or a variant of “DLK1” encoded by a nucleic acid that hybridizes to the “DLK1” nucleic acid or its complement under low stringency conditions,

[1762] (viii) “DSCD75” (SEQ ID No:8) or a functionally active derivative thereof, or a functionally active fragment thereof, or a homolog thereof, or a variant of “DSCD75” encoded by a nucleic acid that hybridizes to the “DSCD75” nucleic acid or its complement under low stringency conditions,

[1763] (ix) “FADS2” (SEQ ID No:40) or a functionally active derivative thereof, or a functionally active fragment thereof, or a homolog thereof, or a variant of “FADS2” encoded by a nucleic acid that hybridizes to the “FADS2” nucleic acid or its complement under low stringency conditions,

[1764] (x) “GPR49” (SEQ ID No:115) or a functionally active derivative thereof, or a functionally active fragment thereof, or a homolog thereof, or a variant of “GPR49” encoded by a nucleic acid that hybridizes to the “GPR49” nucleic acid or its complement under low stringency conditions,

[1765] (xi) “ITM2C” (SEQ ID No:13) or a functionally active derivative thereof, or a functionally active fragment thereof, or a homolog thereof, or a variant of “ITM2C” encoded by a nucleic acid that hybridizes to the “ITM2C” nucleic acid or its complement under low stringency conditions,

[1766] (xii) “KiDins220” (SEQ ID No:17) or a functionally active derivative thereof, or a functionally active fragment thereof, or a homolog thereof, or a variant of “KiDins220” encoded by a nucleic acid that hybridizes to the “KiDins220” nucleic acid or its complement under low stringency conditions,

[1767] (xiii) “LAPTM4B” (SEQ ID No:33) or a functionally active derivative thereof, or a functionally active fragment thereof, or a homolog thereof, or a variant of “LAPTM4B” encoded by a nucleic acid that hybridizes to the “LAPTM4B” nucleic acid or its complement under low stringency conditions,

[1768] (xiv) “Neurotrypsin” (SEQ ID No:19) or a functionally active derivative thereof, or a functionally active fragment thereof, or a homolog thereof, or a variant of “Neurotrypsin” encoded by a nucleic acid that hybridizes to the “Neurotrypsin” nucleic acid or its complement under low stringency conditions,

[1769] (xv) “NogoA” (SEQ ID No:41) or a functionally active derivative thereof, or a functionally active fragment thereof, or a homolog thereof, or a variant of “NogoA” encoded by a nucleic acid that hybridizes to the “NogoA” nucleic acid or its complement under low stringency conditions,

[1770] (xvi) “OS-9” (SEQ ID No:42) or a functionally active derivative thereof, or a functionally active fragment thereof, or a homolog thereof, or a variant of “OS-9” encoded by a nucleic acid that hybridizes to the “OS-9” nucleic acid or its complement under low stringency conditions,

[1771] (xvii) “PDGFRB” (SEQ ID No:43) or a functionally active derivative thereof, or a functionally active fragment thereof, or a homolog thereof, or a variant of “PDGFRB” encoded by a nucleic acid that hybridizes to the “PDGFRB” nucleic acid or its complement under low stringency conditions,

[1772] (xviii) “PTK7” (SEQ ID No:44) or a functionally active derivative thereof, or a functionally active fragment thereof, or a homolog thereof, or a variant of “PTK7” encoded by a nucleic acid that hybridizes to the “PTK7” nucleic acid or its complement under low stringency conditions,

[1773] (xix) “RetSDR2” (SEQ ID No:21) or a functionally active derivative thereof, or a functionally active fragment thereof, or a homolog thereof, or a variant of “RetSDR2” encoded by a nucleic acid that hybridizes to the “RetSDR2” nucleic acid or its complement under low stringency conditions,

[1774] (xx) “S100alpha” (SEQ ID No:34) or a functionally active derivative thereof, or a functionally active fragment thereof, or a homolog thereof, or a variant of “S100alpha” encoded by a nucleic acid that hybridizes to the “S100alpha” nucleic acid or its complement under low stringency conditions,

[1775] (xxi) “SORL1” (SEQ ID No:25) or a functionally active derivative thereof, or a functionally active fragment thereof, or a homolog thereof, or a variant of “SORL1” encoded by a nucleic acid that hybridizes to the “SORL1” nucleic acid or its complement under low stringency conditions,

[1776] (xxii) “stearoyl-CoA desaturase” (SEQ ID No:29) or a functionally active derivative thereof, or a functionally active fragment thereof, or a homolog thereof, or a variant of “stearoyl-CoA desaturase” encoded by a nucleic acid that hybridizes to the “stearoyl-CoA desaturase” nucleic acid or its complement under low stringency conditions,

[1777] (xxiii) “TMP21” (SEQ ID No:30) or a functionally active derivative thereof, or a functionally active fragment thereof, or a homolog thereof, or a variant of “TMP21” encoded by a nucleic acid that hybridizes to the “TMP21” nucleic acid or its complement under low stringency conditions,

[1778] (xxiv) “UGCGL1” (SEQ ID No:45) or a functionally active derivative thereof, or a functionally active fragment thereof, or a homolog thereof, or a variant of “UGCGL1” encoded by a nucleic acid that hybridizes to the “UGCGL1” nucleic acid or its complement under low stringency conditions, and a complex (II) comprising at least two of said second proteins, wherein said low stringency conditions comprise hybridization in a buffer comprising 35% formamide, 5×SSC, 50 mM Tris-HCI (pH 7.5), 5 mM EDTA, 0.02% PVP, 0.02% Ficoll, 0.2% BSA, 100 ug/ml denatured salmon sperm DNA, and 10% (wt/vol) dextran sulfate for 18-20 hours at 40 Celsius, washing in a buffer consisting of 2×SSC, 25 mM Tris-HCI (pH 7.4), 5 mM EDTA, and 0.1% SDS for 1.5 hours at 55 Celsius, and washing in a buffer consisting of 2×SSC, 25 mM Tris-HCI (pH 7.4), 5 mM EDTA, and 0.1% SDS for 1.5 hours at 60 Celsius.

[1779] 2. The protein complex according to No. 1 wherein the first protein is the protein BACE1 (SEQ ID No:38), or a functionally active derivative thereof, or a functionally active fragment thereof, or a homolog thereof, or a variant of ‘BACE1’ encoded by a nucleic acid that hybridizes to the ‘BACE1’ under low stringency conditions.

3. The protein complex according to No. 1-2 and comprising the following proteins:

[1780] (i) “BACE1” (SEQ ID No:38) or a functionally active derivative thereof, or a functionally active fragment thereof, or a homolog thereof, or a variant of “BACE1” encoded by a nucleic acid that hybridizes to the “BACE1” nucleic acid or its complement under low stringency conditions,

[1781] (ii) “APP” (SEQ ID No:23) or a functionally active derivative thereof, or a functionally active fragment thereof, or a homolog thereof, or a variant of “APP” encoded by a nucleic acid that hybridizes to the “APP” nucleic acid or its complement under low stringency conditions,

[1782] (iii) “Nicastrin” (SEQ ID No:9) or a functionally active derivative thereof, or a functionally active fragment thereof, or a homolog thereof, or a variant of “Nicastrin” encoded by a nucleic acid that hybridizes to the “Nicastrin” nucleic acid or its complement under low stringency conditions,

[1783] (iv) “ACAT1” (SEQ ID No:4) or a functionally active derivative thereof, or a functionally active fragment thereof, or a homolog thereof, or a variant of “ACAT1” encoded by a nucleic acid that hybridizes to the “ACAT1” nucleic acid or its complement under low stringency conditions,

[1784] (v) “APLP2” (SEQ ID No:22) or a functionally active derivative thereof, or a functionally active fragment thereof, or a homolog thereof, or a variant of “APLP2” encoded by a nucleic acid that hybridizes to the “APLP2” nucleic acid or its complement under low stringency conditions,

[1785] (vi) “BRI” (SEQ ID No:5) or a functionally active derivative thereof, or a functionally active fragment thereof, or a homolog thereof, or a variant of “BRI” encoded by a nucleic acid that hybridizes to the “BRI” nucleic acid or its complement under low stringency conditions,

[1786] (vii) “calsyntenin 1” (SEQ ID No:6) or a functionally active derivative thereof, or a functionally active fragment thereof, or a homolog thereof, or a variant of “calsyntenin 1” encoded by a nucleic acid that hybridizes to the “calsyntenin 1” nucleic acid or its complement under low stringency conditions,

[1787] (viii) “CELSR2” (SEQ ID No:39) or a functionally active derivative thereof, or a functionally active fragment thereof, or a homolog thereof, or a variant of “CELSR2” encoded by a nucleic acid that hybridizes to the “CELSR2” nucleic acid or its complement under low stringency conditions,

[1788] (ix) “CGI-13” (SEQ ID No:72) or a functionally active derivative thereof, or a functionally active fragment thereof, or a homolog thereof, or a variant of “CGI-13” encoded by a nucleic acid that hybridizes to the “CGI-13” nucleic acid or its complement under low stringency conditions,

[1789] (x) “DLK1” (SEQ ID No:7) or a functionally active derivative thereof, or a functionally active fragment thereof, or a homolog thereof, or a variant of “DLK1” encoded by a nucleic acid that hybridizes to the “DLK1” nucleic acid or its complement under low stringency conditions,

[1790] (xi) “DSCD75” (SEQ ID No:8) or a functionally active derivative thereof, or a functionally active fragment thereof, or a homolog thereof, or a variant of “DSCD75” encoded by a nucleic acid that hybridizes to the “DSCD75” nucleic acid or its complement under low stringency conditions,

[1791] (xii) “FADS2” (SEQ ID No:40) or a functionally active derivative thereof, or a functionally active fragment thereof, or a homolog thereof, or a variant of “FADS2” encoded by a nucleic acid that hybridizes to the “FADS2” nucleic acid or its complement under low stringency conditions,

[1792] (xiii) “GPR49” (SEQ ID No:115) or a functionally active derivative thereof, or a functionally active fragment thereof, or a homolog thereof, or a variant of “GPR49” encoded by a nucleic acid that hybridizes to the “GPR49” nucleic acid or its complement under low stringency conditions,

[1793] (xiv) “ITM2C” (SEQ ID No:13) or a functionally active derivative thereof, or a functionally active fragment thereof, or a homolog thereof, or a variant of “ITM2C” encoded by a nucleic acid that hybridizes to the “ITM2C” nucleic acid or its complement under low stringency conditions,

[1794] (xv) “KiDins220” (SEQ ID No:17) or a functionally active derivative thereof, or a functionally active fragment thereof, or a homolog thereof, or a variant of “KiDins220” encoded by a nucleic acid that hybridizes to the “KiDins220” nucleic acid or its complement under low stringency conditions,

[1795] (xvi) “LAPTM4B” (SEQ ID No:33) or a functionally active derivative thereof, or a functionally active fragment thereof, or a homolog thereof, or a variant of “LAPTM4B” encoded by a nucleic acid that hybridizes to the “LAPTM4B” nucleic acid or its complement under low stringency conditions,

[1796] (xvii) “Neurotrypsin” (SEQ ID No:19) or a functionally active derivative thereof, or a functionally active fragment thereof, or a homolog thereof, or a variant of “Neurotrypsin” encoded by a nucleic acid that hybridizes to the “Neurotrypsin” nucleic acid or its complement under low stringency conditions,

[1797] (xviii) “NogoA” (SEQ ID No:41) or a functionally active derivative thereof, or a functionally active fragment thereof, or a homolog thereof, or a variant of “NogoA” encoded by a nucleic acid that hybridizes to the “NogoA” nucleic acid or its complement under low stringency conditions,

[1798] (xix) “OS-9” (SEQ ID No:42) or a functionally active derivative thereof, or a functionally active fragment thereof, or a homolog thereof, or a variant of “OS-9” encoded by a nucleic acid that hybridizes to the “OS-9” nucleic acid or its complement under low stringency conditions,

[1799] (xx) “PDGFRB” (SEQ ID No:43) or a functionally active derivative thereof, or a functionally active fragment thereof, or a homolog thereof, or a variant of “PDGFRB” encoded by a nucleic acid that hybridizes to the “PDGFRB” nucleic acid or its complement under low stringency conditions,

[1800] (xxi) “PTK7” (SEQ ID No:44) or a functionally active derivative thereof, or a functionally active fragment thereof, or a homolog thereof, or a variant of “PTK7” encoded by a nucleic acid that hybridizes to the “PTK7” nucleic acid or its complement under low stringency conditions,

[1801] (xxii) “RetSDR2” (SEQ ID No:21) or a functionally active derivative thereof, or a functionally active fragment thereof, or a homolog thereof, or a variant of “RetSDR2” encoded by a nucleic acid that hybridizes to the “RetSDR2” nucleic acid or its complement under low stringency conditions,

[1802] (xxiii) “S100alpha” (SEQ ID No:34) or a functionally active derivative thereof, or a functionally active fragment thereof, or a homolog thereof, or a variant of “S100alpha” encoded by a nucleic acid that hybridizes to the “S100alpha” nucleic acid or its complement under low stringency conditions,

[1803] (xxiv) “SORL1” (SEQ ID No:25) or a functionally active derivative thereof, or a functionally active fragment thereof, or a homolog thereof, or a variant of “SORL1” encoded by a nucleic acid that hybridizes to the “SORL1” nucleic acid or its complement under low stringency conditions,

[1804] (xxv) “stearoyl-CoA desaturase” (SEQ ID No:29) or a functionally active derivative thereof, or a functionally active fragment thereof, or a homolog thereof, or a variant of “stearoyl-CoA desaturase” encoded by a nucleic acid that hybridizes to the “stearoyl-CoA desaturase” nucleic acid or its complement under low stringency conditions,

[1805] (xxvi) “TMP21” (SEQ ID No:30) or a functionally active derivative thereof, or a functionally active fragment thereof, or a homolog thereof, or a variant of “TMP21” encoded by a nucleic acid that hybridizes to the “TMP21” nucleic acid or its complement under low stringency conditions,

[1806] (xxvii) “UGCGL1” (SEQ ID No:45) or a functionally active derivative thereof, or a functionally active fragment thereof, or a homolog thereof, or a variant of “UGCGL1” encoded by a nucleic acid that hybridizes to the “UGCGL1” nucleic acid or its complement under low stringency conditions.

4. The protein complex according to No. 1 comprising all but 1-24 of the following proteins:

[1807] (i) “BACE1” (SEQ ID No:38) or a functionally active derivative thereof, or a functionally active fragment thereof, or a homolog thereof, or a variant of “BACE1” encoded by a nucleic acid that hybridizes to the “BACE1” nucleic acid or its complement under low stringency conditions,

[1808] (ii) “APP” (SEQ ID No:23) or a functionally active derivative thereof, or a functionally active fragment thereof, or a homolog thereof, or a variant of “APP” encoded by a nucleic acid that hybridizes to the “APP” nucleic acid or its complement under low stringency conditions,

[1809] (iii) “Nicastrin” (SEQ ID No:9) or a functionally active derivative thereof, or a functionally active fragment thereof, or a homolog thereof, or a variant of “Nicastrin” encoded by a nucleic acid that hybridizes to the “Nicastrin” nucleic acid or its complement under low stringency conditions,

[1810] (iv) “ACAT1” (SEQ ID No:4) or a functionally active derivative thereof, or a functionally active fragment thereof, or a homolog thereof, or a variant of “ACAT1” encoded by a nucleic acid that hybridizes to the “ACAT1” nucleic acid or its complement under low stringency conditions,

[1811] (v) “APLP2” (SEQ ID No:22) or a functionally active derivative thereof, or a functionally active fragment thereof, or a homolog thereof, or a variant of “APLP2” encoded by a nucleic acid that hybridizes to the “APLP2” nucleic acid or its complement under low stringency conditions,

[1812] (vi) “BRI” (SEQ ID No:5) or a functionally active derivative thereof, or a functionally active fragment thereof, or a homolog thereof, or a variant of “BRI” encoded by a nucleic acid that hybridizes to the “BRI” nucleic acid or its complement under low stringency conditions,

[1813] (vii) “calsyntenin 1” (SEQ ID No:6) or a functionally active derivative thereof, or a functionally active fragment thereof, or a homolog thereof, or a variant of “calsyntenin 1” encoded by a nucleic acid that hybridizes to the “calsyntenin 1” nucleic acid or its complement under low stringency conditions,

[1814] (viii) “CELSR2” (SEQ ID No:39) or a functionally active derivative thereof, or a functionally active fragment thereof, or a homolog thereof, or a variant of “CELSR2” encoded by a nucleic acid that hybridizes to the “CELSR2” nucleic acid or its complement under low stringency conditions,

[1815] (ix) “CGI-13” (SEQ ID No:72) or a functionally active derivative thereof, or a functionally active fragment thereof, or a homolog thereof, or a variant of “CGI-13” encoded by a nucleic acid that hybridizes to the “CGI-13” nucleic acid or its complement under low stringency conditions,

[1816] (x) “DLK1” (SEQ ID No:7) or a functionally active derivative thereof, or a functionally active fragment thereof, or a homolog thereof, or a variant of “DLK1” encoded by a nucleic acid that hybridizes to the “DLK1” nucleic acid or its complement under low stringency conditions,

[1817] (xi) “DSCD75” (SEQ ID No:8) or a functionally active derivative thereof, or a functionally active fragment thereof, or a homolog thereof, or a variant of “DSCD75” encoded by a nucleic acid that hybridizes to the “DSCD75” nucleic acid or its complement under low stringency conditions,

[1818] (xii) “FADS2” (SEQ ID No:40) or a functionally active derivative thereof, or a functionally active fragment thereof, or a homolog thereof, or a variant of “FADS2” encoded by a nucleic acid that hybridizes to the “FADS2” nucleic acid or its complement under low stringency conditions,

[1819] (xiii) “GPR49” (SEQ ID No:115) or a functionally active derivative thereof, or a functionally active fragment thereof, or a homolog thereof, or a variant of “GPR49” encoded by a nucleic acid that hybridizes to the “GPR49” nucleic acid or its complement under low stringency conditions,

[1820] (xiv) “ITM2C” (SEQ ID No:13) or a functionally active derivative thereof, or a functionally active fragment thereof, or a homolog thereof, or a variant of “ITM2C” encoded by a nucleic acid that hybridizes to the “ITM2C” nucleic acid or its complement under low stringency conditions,

[1821] (xv) “KiDins220” (SEQ ID No:17) or a functionally active derivative thereof, or a functionally active fragment thereof, or a homolog thereof, or a variant of “KiDins220” encoded by a nucleic acid that hybridizes to the “KiDins220” nucleic acid or its complement under low stringency conditions,

[1822] (xvi) “LAPTM4B” (SEQ ID No:33) or a functionally active derivative thereof, or a functionally active fragment thereof, or a homolog thereof, or a variant of “LAPTM4B” encoded by a nucleic acid that hybridizes to the “LAPTM4B” nucleic acid or its complement under low stringency conditions,

[1823] (xvii) “Neurotrypsin” (SEQ ID No:19) or a functionally active derivative thereof, or a functionally active fragment thereof, or a homolog thereof, or a variant of “Neurotrypsin” encoded by a nucleic acid that hybridizes to the “Neurotrypsin” nucleic acid or its complement under low stringency conditions,

[1824] (xviii) “NogoA” (SEQ ID No:41) or a functionally active derivative thereof, or a functionally active fragment thereof, or a homolog thereof, or a variant of “NogoA” encoded by a nucleic acid that hybridizes to the “NogoA” nucleic acid or its complement under low stringency conditions,

[1825] (xix) “OS-9” (SEQ ID No:42) or a functionally active derivative thereof, or a functionally active fragment thereof, or a homolog thereof, or a variant of “OS-9” encoded by a nucleic acid that hybridizes to the “OS-9” nucleic acid or its complement under low stringency conditions,

[1826] (xx) “PDGFRB” (SEQ ID No:43) or a functionally active derivative thereof, or a functionally active fragment thereof, or a homolog thereof, or a variant of “PDGFRB” encoded by a nucleic acid that hybridizes to the “PDGFRB” nucleic acid or its complement under low stringency conditions,

[1827] (xxi) “PTX7” (SEQ ID No:44) or a functionally active derivative thereof, or a functionally active fragment thereof, or a homolog thereof, or a variant of “PTK7” encoded by a nucleic acid that hybridizes to the “PTK7” nucleic acid or its complement under low stringency conditions,

[1828] (xxii) “RetSDR2” (SEQ ID No:21) or a functionally active derivative thereof, or a functionally active fragment thereof, or a homolog thereof, or a variant of “RetSDR2” encoded by a nucleic acid that hybridizes to the “RetSDR2” nucleic acid or its complement under low stringency conditions,

[1829] (xxiii) “S100alpha” (SEQ ID No:34) or a functionally active derivative thereof, or a functionally active fragment thereof, or a homolog thereof, or a variant of “S100alpha” encoded by a nucleic acid that hybridizes to the “S100alpha” nucleic acid or its complement under low stringency conditions,

[1830] (xxiv) “SORL1” (SEQ ID No:25) or a functionally active derivative thereof, or a functionally active fragment thereof, or a homolog thereof, or a variant of “SORL1” encoded by a nucleic acid that hybridizes to the “SORL1” nucleic acid or its complement under low stringency conditions,

[1831] (xxv) “stearoyl-CoA desaturase” (SEQ ID No:29) or a functionally active derivative thereof, or a functionally active fragment thereof, or a homolog thereof, or a variant of “stearoyl-CoA desaturase” encoded by a nucleic acid that hybridizes to the “stearoyl-CoA desaturase” nucleic acid or its complement under low stringency conditions,

[1832] (xxvi) “TMP21” (SEQ ID No:30) or a functionally active derivative thereof, or a functionally active fragment thereof, or a homolog thereof, or a variant of “TMP21” encoded by a nucleic acid that hybridizes to the “TMP21” nucleic acid or its complement under low stringency conditions,

[1833] (xxvii) “UGCGL1” (SEQ ID No:45) or a functionally active derivative thereof, or a functionally active fragment thereof, or a homolog thereof, or a variant of “UGCGL1” encoded by a nucleic acid that hybridizes to the “UGCGL1” nucleic acid or its complement under low stringency conditions.

[1834] 5. The complex of any of No. 1-4 comprising a functionally active derivative of said first protein and/or a functionally active derivative of said second protein, wherein the functionally active derivative is a fusion protein comprising said first protein or said second protein fused to an amino acid sequence different from the first protein or second protein, respectively.

6. The complex of No. 5 wherein the functionally active derivative is a fusion protein comprising said first protein or said second protein fused to an affinity tag or label.

7. The complex of any of No. 1-4 comprising a fragment of said first protein and/or a fragment of said second protein, which fragment binds to another protein component of said complex.

[1835] 8. The complex of any of No. 1-7 that is involved in the transactivation of a Gal4-driven reporter gene (e.g. by modifying the expression of one or several interacting proteins in cells by means of RNAi (siRNA) and/or plasmids encoding the interacting protein(s)), the production of Abeta-40 and Abeta-42 peptides by ELISA (e.g. by modifying the expression of one or several interacting proteins in cells by means of RNAi (siRNA) and/or plasmids encoding the interacting protein(s)), the production of C-terminal APP fragments in cell lines or transgenic animals by western blot (e.g. by modifying the expression of one or several interacting proteins in cells by means of RNAi (siRNA) and/or plasmids encoding the interacting protein(s)) or the proteolytic activity of beta- or gamma secretases towards bacterially expressed APP fragments in vitro (e.g. by modifying the expression of one or several interacting proteins in cells by means of RNAi (siRNA) and/or plasmids encoding the interacting protein(s)).

[1836] 9. A process for preparing a complex of any of No. 1-8 and optionally the components thereof comprising the following steps: expressing a protein (bait) of the complex, preferably a tagged protein, in a target cell, isolating the protein complex which is attached to the bait protein, and optionally dissociating the protein complex and isolating the individual complex members.

10. The process according to No. 9 wherein the tagged protein comprises two different tags which allow two separate affinity purification steps.

11. The process according to any of No. 9-10 wherein the two tags are separated by a cleavage site for a protease.

12. Component of the Fe65 complex obtainable by a process according to any of No. 9-11.

[1837] 13. Construct, preferably a vector construct, comprising at least two separate nucleic acid sequences each encoding a different protein, or a functionally active fragment or a functionally active derivative of at least one of said proteins, or functionally active fragments or functionally active derivative thereof being selected from the first group of proteins according to No. 1 (a) and at least one of said proteins, or functionally active fragments or functionally active derivative thereof being selected from the second group of proteins according to No. 1 (b).

[1838] 14. Host cell, containing a construct of No. 13 or containing several vectors each comprising at least the nucleic acid sequence encoding at least one of the proteins, or functionally active fragments or functionally active derivatives thereof selected from the first group of proteins according to No. 1 (a) and the proteins, or functionally active fragments or functionally active derivatives thereof selected from the second group of proteins according to No. 1 (b).

[1839] 15. An antibody or a fragment of said antibody containing the binding domain thereof, selected from an antibody or fragment thereof, which binds the complex of any of No. 1-8 and which does not bind any of the proteins of said complex when uncomplexed.

16. A kit comprising in one or more container the complex of any of No. 1-8 optionally together with an antibody according to No. 15 and/or further components such as reagents and working instructions.

17. The kit according to No. 16 for processing a substrate of said complex.

18. The kit according to No. 16 for the diagnosis or prognosis of a disease or a disease risk, preferentially for a disease or disorder such as neurodegenerative disease such as Alzheimer's disease.

19. Array, in which at least a complex according to any of No. 1-8 and/or at least one antibody according to No. 15 is attached to a solid carrier.

20. A process for processing a physiological substrate of the complex comprising the step of bringing into contact a complex to any of No. 1-8 with said substrate, such that said substrate is processed.

21. A pharmaceutical composition comprising the protein complex of any of No. 1-8 and/or any of the following the proteins:

[1840] (i) “BACE1” (SEQ ID No:38) or a functionally active derivative thereof, or a functionally active fragment thereof, or a homolog thereof, or a variant of “BACE1” encoded by a nucleic acid that hybridizes to the “BACE1” nucleic acid or its complement under low stringency conditions,

[1841] (ii) “APP” (SEQ ID No:23) or a functionally active derivative thereof, or a functionally active fragment thereof, or a homolog thereof, or a variant of “APP” encoded by a nucleic acid that hybridizes to the “APP” nucleic acid or its complement under low stringency conditions,

[1842] (iii) “Nicastrin” (SEQ ID No:9) or a functionally active derivative thereof, or a functionally active fragment thereof, or a homolog thereof, or a variant of “Nicastrin” encoded by a nucleic acid that hybridizes to the “Nicastrin” nucleic acid or its complement under low stringency conditions,

[1843] (iv) “ACAT1” (SEQ ID No:4) or a functionally active derivative thereof, or a functionally active fragment thereof, or a homolog thereof, or a variant of “ACAT1” encoded by a nucleic acid that hybridizes to the “ACAT1” nucleic acid or its complement under low stringency conditions,

[1844] (v) “APLP2” (SEQ ID No:22) or a functionally active derivative thereof, or a functionally active fragment thereof, or a homolog thereof, or a variant of “APLP2” encoded by a nucleic acid that hybridizes to the “APLP2” nucleic acid or its complement under low stringency conditions,

[1845] (vi) “BRI” (SEQ ID N6:5) or a functionally active derivative thereof, or a functionally active fragment thereof, or a homolog thereof, or a variant of “BRI” encoded by a nucleic acid that hybridizes to the “BRI” nucleic acid or its complement under low stringency conditions,

[1846] (vii) “calsyntenin 1” (SEQ ID No:6) or a functionally active derivative thereof, or a functionally active fragment thereof, or a homolog thereof, or a variant of “calsyntenin 1” encoded by a nucleic acid that hybridizes to the “calsyntenin 1” nucleic acid or its complement under low stringency conditions,

[1847] (viii) “CELSR2” (SEQ ID No:39) or a functionally active derivative thereof, or a functionally active fragment thereof, or a homolog thereof, or a variant of “CELSR2” encoded by a nucleic acid that hybridizes to the “CELSR2” nucleic acid or its complement under low stringency conditions,

[1848] (ix) “CGI-13” (SEQ ID No:72) or a functionally active derivative thereof, or a functionally active fragment thereof, or a homolog thereof, or a variant of “CGI-13” encoded by a nucleic acid that hybridizes to the “CGI-13” nucleic acid or its complement under low stringency conditions,

[1849] (x) “DLK1” (SEQ ID No:7) or a functionally active derivative thereof, or a functionally active fragment thereof, or a homolog thereof, or a variant of “DLK1” encoded by a nucleic acid that hybridizes to the “DLK1” nucleic acid or its complement under low stringency conditions,

[1850] (xi) “DSCD75” (SEQ ID No:8) or a functionally active derivative thereof, or a functionally active fragment thereof, or a homolog thereof, or a variant of “DSCD75” encoded by a nucleic acid that hybridizes to the “DSCD75” nucleic acid or its complement under low stringency conditions,

[1851] (xii) “FADS2” (SEQ ID No:40) or a functionally active derivative thereof, or a functionally active fragment thereof, or a homolog thereof, or a variant of “FADS2” encoded by a nucleic acid that hybridizes to the “FADS2” nucleic acid or its complement under low stringency conditions,

[1852] (xiii) “GPR49” (SEQ ID No:115) or a functionally active derivative thereof, or a functionally active fragment thereof, or a homolog thereof, or a variant of “GPR49” encoded by a nucleic acid that hybridizes to the “GPR49” nucleic acid or its complement under low stringency conditions,

[1853] (xiv) “ITM2C” (SEQ ID No:13) or a functionally active derivative thereof, or a functionally active fragment thereof, or a homolog thereof, or a variant of “ITM2C” encoded by a nucleic acid that hybridizes to the “ITM2C” nucleic acid or its complement under low stringency conditions,

[1854] (xv) “KiDins220” (SEQ ID No:17) or a functionally active derivative thereof, or a functionally active fragment thereof, or a homolog thereof, or a variant of “KiDins220” encoded by a nucleic acid that hybridizes to the “KiDins220” nucleic acid or its complement under low stringency conditions,

[1855] (xvi) “LAPTM4B” (SEQ ID No:33) or a functionally active derivative thereof, or a functionally active fragment thereof, or a homolog thereof, or a variant of “LAPTM4B” encoded by a nucleic acid that hybridizes to the “LAPTM4B” nucleic acid or its complement under low stringency conditions,

[1856] (xvii) “Neurotrypsin” (SEQ ID No:19) or a functionally active derivative thereof, or a functionally active fragment thereof, or a homolog thereof, or a variant of “Neurotrypsin” encoded by a nucleic acid that hybridizes to the “Neurotrypsin” nucleic acid or its complement under low stringency conditions,

[1857] (xviii) “NogoA” (SEQ ID No:41) or a functionally active derivative thereof, or a functionally active fragment thereof, or a homolog thereof, or a variant of “NogoA” encoded by a nucleic acid that hybridizes to the “NogoA” nucleic acid or its complement under low stringency conditions,

[1858] (xix) “OS-9” (SEQ ID No:42) or a functionally active derivative thereof, or a functionally active fragment thereof, or a homolog thereof, or a variant of “OS-9” encoded by a nucleic acid that hybridizes to the “OS-9” nucleic acid or its complement under low stringency conditions,

[1859] (xx) “PDGFRB” (SEQ ID No:43) or a functionally active derivative thereof, or a functionally active fragment thereof, or a homolog thereof, or a variant of “PDGFRB” encoded by a nucleic acid that hybridizes to the “PDGFRB” nucleic acid or its complement under low stringency conditions,

[1860] (xxi) “PTK7” (SEQ ID No:44) or a functionally active derivative thereof, or a functionally active fragment thereof, or a homolog thereof, or a variant of “PTK7” encoded by a nucleic acid that hybridizes to the “PTK7” nucleic acid or its complement under low stringency conditions,

[1861] (xxii) “RetSDR2” (SEQ ID No:21) or a functionally active derivative thereof, or a functionally active fragment thereof, or a homolog thereof, or a variant of “RetSDR2” encoded by a nucleic acid that hybridizes to the “RetSDR2” nucleic acid or its complement under low stringency conditions,

[1862] (xxiii) “S100alpha” (SEQ ID No:34) or a functionally active derivative thereof, or a functionally active fragment thereof, or a homolog thereof, or a variant of “S100alpha” encoded by a nucleic acid that hybridizes to the “S100alpha” nucleic acid or its complement under low stringency conditions,

[1863] (xxiv) “SORL1” (SEQ ID No:25) or a functionally active derivative thereof, or a functionally active fragment thereof, or a homolog thereof, or a variant of “SORL1” encoded by a nucleic acid that hybridizes to the “SORL1” nucleic acid or its complement under low stringency conditions,

[1864] (xxv) “stearoyl-CoA desaturase” (SEQ ID No:29) or a functionally active derivative thereof, or a functionally active fragment thereof, or a homolog thereof, or a variant of “stearoyl-CoA desaturase” encoded by a nucleic acid that hybridizes to the “stearoyl-CoA desaturase” nucleic acid or its complement under low stringency conditions,

[1865] (xxvi) “TMP21” (SEQ D No:30) or a functionally active derivative thereof, or a functionally active fragment thereof, or a homolog thereof, or a variant of “TMP21” encoded by a nucleic acid that hybridizes to the “T21” nucleic acid or its complement under low stringency conditions,

[1866] (xxvii) “UGCGL1” (SEQ ID No:45) or a functionally active derivative thereof, or a functionally active fragment thereof, or a homolog thereof, or a variant of “UGCGL1” encoded by a nucleic acid that hybridizes to the “UGCGL1” nucleic acid or its complement under low stringency conditions., and a pharmaceutical acceptable carrier.

22. A pharmaceutical composition according to No. 21 for the treatment of diseases and disorders such as neurodegenerative disease such as Alzheimer's disease.

[1867] 23. A method for screening for a molecule that modulates directly or indirectly the function, activity, composition or formation of the complex of any one of No. 1-8 comprising the steps of: (a) exposing said complex, or a cell or organism containing BACE1-complex to one or more candidate molecules; and

[1868] (b) determining the amount of activity of protein components of, and/or intracellular localization of, said complex and/or the transcription level of a gene dependent on the complex and/or the abundance and/or activity of a protein or protein complex dependent on the function of the complex and/or product of a gene dependent on the complex in the presence of the one or more candidate molecules, wherein a change in said amount, activity, protein components or intracellular localization relative to said amount, activity, protein components and/or intracellular localization and/or a change in the transcription level of a gene dependent on the complex and/or the abundance and/or activity of a protein or protein complex dependent on the function of the complex and/or product of a gene dependent on the complex in the absence of said candidate molecules indicates that the molecule modulates function, activity or composition of said complex.

24. The method of No. 23, wherein the amount of said complex is determined.

25. The method of No. 23 wherein the activity of said complex is determined.

[1869] 26. The method of No. 25 wherein said determining step comprises isolating from the cell or organism said complex to produce said isolated complex and contacting said isolated complex in the presence or absence of a candidate molecule with a substrate of said complex and determining the processing of said substrate is modified in the presence of said candidate molecule.

27. The method of No. 24 wherein the amount of the individual protein components of said complex are determined.

28. The method of No. 27 wherein said determining step comprises determining whether

[1870] (i) “BACE1” (SEQ ID No:38) or a functionally active derivative thereof, or a functionally active fragment thereof, or a homolog thereof, or a variant of “BACE1” encoded by a nucleic acid that hybridizes to the “BACE1” nucleic acid or its complement under low stringency conditions, and/or

[1871] (ii) “APP” (SEQ ID No:23) or a functionally active derivative thereof, or a functionally active fragment thereof, or a homolog thereof, or a variant of “APP” encoded by a nucleic acid that hybridizes to the “APP” nucleic acid or its complement under low stringency conditions, and/or

[1872] (iii) “Nicastrin” (SEQ ID No:9) or a functionally active derivative thereof, or a functionally active fragment thereof; or a homolog thereof, or a variant of “Nicastrin” encoded by a nucleic acid that hybridizes to the “Nicastrin” nucleic acid or its complement under low stringency conditions, and/or

[1873] (iv) “ACAT1” (SEQ ID No:4) or a functionally active derivative thereof, or a functionally active fragment thereof, or a homolog thereof, or a variant of “ACAT1” encoded by a nucleic acid that hybridizes to the “ACAT1” nucleic acid or its complement under low stringency conditions, and/or

[1874] (v) “APLP2” (SEQ ID No:22) or a functionally active derivative thereof, or a functionally active fragment thereof, or a homolog thereof, or a variant of “APLP2” encoded by a nucleic acid that hybridizes to the “APLP2” nucleic acid or its complement under low stringency conditions, and/or

[1875] (vi) “BRI” (SEQ ID No:5) or a functionally active derivative thereof, or a functionally active fragment thereof, or a homolog thereof, or a variant of “BRI” encoded by a nucleic acid that hybridizes to the “BRI” nucleic acid or its complement under low stringency conditions, and/or

[1876] (vii) “calsyntenin 1” (SEQ ID No:6) or a functionally active derivative thereof, or a functionally active fragment thereof, or a homolog thereof, or a variant of “calsyntenin 1” encoded by a nucleic acid that hybridizes to the “calsyntenin 1” nucleic acid or its complement under low stringency conditions, and/or

[1877] (viii) “CELSR2” (SEQ ID No:39) or a functionally active derivative thereof, or a functionally active fragment thereof, or a homolog thereof, or a variant of “CELSR2” encoded by a nucleic acid that hybridizes to the “CELSR2” nucleic acid or its complement under low stringency conditions, and/or

[1878] (ix) “CGI-13” (SEQ ID No:72) or a functionally active derivative thereof, or a functionally active fragment thereof, or a homolog thereof, or a variant of “CGI-13” encoded by a nucleic acid that hybridizes to the “CGI-13” nucleic acid or its complement under low stringency conditions, and/or

[1879] (x) “DLK1” (SEQ ID No:7) or a functionally active derivative thereof, or a functionally active fragment thereof, or a homolog thereof, or a variant of “DLK1” encoded by a nucleic acid that hybridizes to the “DLK1” nucleic acid or its complement under low stringency conditions, and/or

[1880] (xi) “DSCD75” (SEQ ID No:8) or a functionally active derivative thereof, or a functionally active fragment thereof, or a homolog thereof, or a variant of “DSCD75” encoded by a nucleic acid that hybridizes to the “DSCD75” nucleic acid or its complement under low stringency conditions, and/or

[1881] (xii) “FADS2” (SEQ ID No:40) or a functionally active derivative thereof, or a functionally active fragment thereof, or a homolog thereof, or a variant of “FADS2” encoded by a nucleic acid that hybridizes to the “FADS2” nucleic acid or its complement under low stringency conditions, and/or

[1882] (xiii) “GPR49” (SEQ ID No:115) or a functionally active derivative thereof, or a functionally active fragment thereof, or a homolog thereof, or a variant of “GPR49” encoded by a nucleic acid that hybridizes to the “GPR49” nucleic acid or its complement under low stringency conditions, and/or

[1883] (xiv) “ITM2C” (SEQ ID No:13) or a functionally active derivative thereof, or a functionally active fragment thereof, or a homolog thereof, or a variant of “ITM2C” encoded by a nucleic acid that hybridizes to the “ITM2C” nucleic acid or its complement under low stringency conditions, and/or

[1884] (xv) “KiDins220” (SEQ ID No:17) or a functionally active derivative thereof, or a functionally active fragment thereof, or a homolog thereof, or a variant of “KiDins220” encoded by a nucleic acid that hybridizes to the “KiDins220” nucleic acid or its complement under low stringency conditions, and/or

[1885] (xvi) “LAPTM4B” (SEQ ID No:33) or a functionally active derivative thereof, or a functionally active fragment thereof, or a homolog thereof, or a variant of “LAPTM4B” encoded by a nucleic acid that hybridizes to the “LAPTM4B” nucleic acid or its complement under low stringency conditions, and/or

[1886] (xvii) “Neurotrypsin” (SEQ ID No:19) or a functionally active derivative thereof, or a functionally active fragment thereof, or a homolog thereof, or a variant of “Neurotrypsin” encoded by a nucleic acid that hybridizes to the “Neurotrypsin” nucleic acid or its complement under low stringency conditions, and/or

[1887] (xviii) “NogoA” (SEQ ID No:41) or a functionally active derivative thereof, or a functionally active fragment thereof, or a homolog thereof, or a variant of “NogoA” encoded by a nucleic acid that hybridizes to the “NogoA” nucleic acid or its complement under low stringency conditions, and/or

[1888] (xix) “OS-9” (SEQ ID No:42) or a functionally active derivative thereof, or a functionally active fragment thereof, or a homolog thereof, or a variant of “OS-9” encoded by a nucleic acid that hybridizes to the “OS-9” nucleic acid or its complement under low stringency conditions, and/or

[1889] (xx) “PDGFRB” (SEQ ID No:43) or a functionally active derivative thereof, or a functionally active fragment thereof, or a homolog thereof, or a variant of “PDGFRB” encoded by a nucleic acid that hybridizes to the “PDGFRB” nucleic acid or its complement under low stringency conditions, and/or

[1890] (xxi) “PTK7” (SEQ ID No:44) or a functionally active derivative thereof, or a functionally active fragment thereof, or a homolog thereof, or a variant of “PTK7” encoded by a nucleic acid that hybridizes to the “PTK7” nucleic acid or its complement under low stringency conditions, and/or

[1891] (xxii) “RetSDR2” (SEQ ID No:21) or a functionally active derivative thereof, or a functionally active fragment thereof, or a homolog thereof, or a variant of “RetSDR2” encoded by a nucleic acid that hybridizes to the “RetSDR2” nucleic acid or its complement under low stringency conditions, and/or

[1892] (xxiii) “S100alpha” (SEQ ID No:34) or a functionally active derivative thereof, or a functionally active fragment thereof, or a homolog thereof, or a variant of “S100alpha” encoded by a nucleic acid that hybridizes to the “S100alpha” nucleic acid or its complement under low stringency conditions, and/or

[1893] (xxiv) “SORL1” (SEQ ID No:25) or a functionally active derivative thereof, or a functionally active fragment thereof, or a homolog thereof, or a variant of “SORL1” encoded by a nucleic acid that hybridizes to the “SORL1” nucleic acid or its complement under low stringency conditions, and/or

[1894] (xxv) “stearoyl-CoA desaturase” (SEQ ID No:29) or a functionally active derivative thereof, or a functionally active fragment thereof, or a homolog thereof, or a variant of “stearoyl-CoA desaturase” encoded by a nucleic acid that hybridizes to the “stearoyl-CoA desaturase” nucleic acid or its complement under low stringency conditions, and/or

[1895] (xxvi) “TMP21” (SEQ ID No:30) or a functionally active derivative thereof, or a functionally active fragment thereof, or a homolog thereof, or a variant of “TMP21” encoded by a nucleic acid that hybridizes to the “TMP21” nucleic acid or its complement under low stringency conditions, and/or

[1896] (xxvii) “UGCGL1” (SEQ ID No:45) or a functionally active derivative thereof, or a functionally active fragment thereof, or a homolog thereof, or a variant of “UGCGL1” encoded by a nucleic acid that hybridizes to the “UGCGL1” nucleic acid or its complement under low stringency conditions, is present in the complex.

29. The method of any of No. 23-28 wherein said method is a method of screening for a drug for treatment or prevention of a disease or disorder such as neurodegenerative disease such as Alzheimer's disease.

[1897] 30. Use of a molecule that modulates the amount of, activity of, or the protein components of the complex of any one of No. 1-8 for the manufacture of a medicament for the treatment or prevention of a disease or disorder such as neurodegenerative disease such as Alzheimer's disease.

[1898] 31. A method for the production of a pharmaceutical composition comprising carrying out the method of any of No. 1-8 to identify a molecule that modulates the function, activity, composition or formation of said complex, and further comprising mixing the identified molecule with a pharmaceutically acceptable carrier.

[1899] 32. A method for diagnosing or screening for the presence of a disease or disorder or a predisposition for developing a disease or disorder in a subject, which disease or disorder is characterized by an aberrant amount of, activity of, or component composition of, or intracellular localization of the complex of any one of the No. 1-8, comprising determining the amount of, activity of, protein components of, and/or intracellular localization of, said complex and/or the transcription level of a gene dependent on the complex and/or the abundance and/or activity of a protein or protein complex dependent on the function of the complex and/or product of a gene dependent on the complex in a comparative sample derived from a subject, wherein a difference in said amount, activity, or protein components of, said complex in an analogous sample from a subject not having the disease or disorder or predisposition indicates the presence in the subject of the disease or disorder or predisposition in the subject.

33. The method of No. 32 wherein the amount of said complex is determined.

34. The method of No. 32 wherein the activity of said complex is determined.

[1900] 35. The method of No. 34 wherein said determining step comprises isolating from the subject said complex to produce said isolated complex and contacting said isolated complex in the presence or absence of a candidate molecule with a substrate of said complex and determining whether said substrate is processed in the absence of the candidate molecule and whether the processing of said substrate is modified in the presence of said candidate molecule.

36. The method of No. 32 wherein the amount of the individual protein components of said complex is determined.

37. The method of No. 36 wherein said determining step comprises determining whether

[1901] (i) “BACE1” (SEQ ID No:38) or a functionally active derivative thereof, or a functionally active fragment thereof, or a homolog thereof, or a variant of “BACE1” encoded by a nucleic acid that hybridizes to the “BACE1” nucleic acid or its complement under low stringency conditions, and/or

[1902] (ii) “APP” (SEQ ID No:23) or a functionally active derivative thereof, or a functionally active fragment thereof, or a homolog thereof, or a variant of “APP” encoded by a nucleic acid that hybridizes to the “APP” nucleic acid or its complement under low stringency conditions, and/or

[1903] (iii) “Nicastrin” (SEQ ID No:9) or a functionally active derivative thereof, or a functionally active fragment thereof, or a homolog thereof, or a variant of “Nicastrin” encoded by a nucleic acid that hybridizes to the “Nicastrin” nucleic acid or its complement under low stringency conditions, and/or

[1904] (iv) “ACAT1” (SEQ ID No:4) or a functionally active derivative thereof, or a functionally active fragment thereof, or a homolog thereof, or a variant of “ACAT1” encoded by a nucleic acid that hybridizes to the “ACAT1” nucleic acid or its complement under low stringency conditions, and/or

[1905] (v) “APLP2” (SEQ ID No:22) or a functionally active derivative thereof, or a functionally active fragment thereof, or a homolog thereof, or a variant of “APLP2” encoded by a nucleic acid that hybridizes to the “APLP2” nucleic acid or its complement under low stringency conditions, and/or

[1906] (vi) “BRI” (SEQ ID No:5) or a functionally active derivative thereof, or a functionally active fragment thereof, or a homolog thereof, or a variant of “BRI” encoded by a nucleic acid that hybridizes to the “BRI” nucleic acid or its complement under low stringency conditions, and/or

[1907] (vii) “calsyntenin 1” (SEQ ID No:6) or a functionally active derivative thereof, or a functionally active fragment thereof, or a homolog thereof, or a variant of “calsyntenin 1” encoded by a nucleic acid that hybridizes to the “calsyntenin 1” nucleic acid or its complement under low stringency conditions, and/or

[1908] (viii) “CELSR2” (SEQ ID No:39) or a functionally active derivative thereof, or a functionally active fragment thereof, or a homolog thereof, or a variant of “CELSR2” encoded by a nucleic acid that hybridizes to the “CELSR2” nucleic acid or its complement under low stringency conditions, and/or

[1909] (ix) “CGI-13” (SEQ ID No:72) or a functionally active derivative thereof, or a functionally active fragment thereof, or a homolog thereof, or a variant of “CGI-13” encoded by a nucleic acid that hybridizes to the “CGI-13” nucleic acid or its complement under low stringency conditions, and/or

[1910] (x) “DLK1” (SEQ ID No:7) or a functionally active derivative thereof, or a functionally active fragment thereof, or a homolog thereof, or a variant of “DLK1” encoded by a nucleic acid that hybridizes to the “DLK1” nucleic acid or its complement under low stringency conditions, and/or

[1911] (xi) “DSCD75” (SEQ ID No:8) or a functionally active derivative thereof, or a functionally active fragment thereof, or a homolog thereof, or a variant of “DSCD75” encoded by a nucleic acid that hybridizes to the “DSCD75” nucleic acid or its complement under low stringency conditions, and/or

[1912] (xii) “FADS2” (SEQ ID No:40) or a functionally active derivative thereof, or a functionally active fragment thereof, or a homolog thereof, or a variant of “FADS2” encoded by a nucleic acid that hybridizes to the “FADS2” nucleic acid or its complement under low stringency conditions, and/or

[1913] (xiii) “GPR49” (SEQ ID No:115) or a functionally active derivative thereof, or a functionally active fragment thereof, or a homolog thereof, or a variant of “GPR49” encoded by a nucleic acid that hybridizes to the “GPR49” nucleic acid or its complement under low stringency conditions, and/or

[1914] (xiv) “ITM2C” (SEQ ID No:13) or a functionally active derivative thereof, or a functionally active fragment thereof, or a homolog thereof, or a variant of “ITM2C” encoded by a nucleic acid that hybridizes to the “ITM2C” nucleic acid or its complement under low stringency conditions, and/or

[1915] (xv) “KiDins220” (SEQ ID No:17) or a functionally active derivative thereof, or a functionally active fragment thereof, or a homolog thereof, or a variant of “KiDins220” encoded by a nucleic acid that hybridizes to the “KiDins220” nucleic acid or its complement under low stringency conditions, and/or

[1916] (xvi) “LAPTM4B” (SEQ ID No:33) or a functionally active derivative thereof, or a functionally active fragment thereof, or a homolog thereof, or a variant of “LAPTM4B” encoded by a nucleic acid that hybridizes to the “LAPTM4B” nucleic acid or its complement under low stringency conditions, and/or

[1917] (xvii) “Neurotrypsin” (SEQ ID No:19) or a functionally active derivative thereof, or a functionally active fragment thereof, or a homolog thereof, or a variant of “Neurotrypsin” encoded by a nucleic acid that hybridizes to the “Neurotrypsin” nucleic acid or its complement under low stringency conditions, and/or

[1918] (xviii) “NogoA” (SEQ ID No:41) or a functionally active derivative thereof, or a functionally active fragment thereof, or a homolog thereof, or a variant of “NogoA” encoded by a nucleic acid that hybridizes to the “NogoA” nucleic acid or its complement under low stringency conditions, and/or

[1919] (xix) “OS-9” (SEQ ID No:42) or a functionally active derivative thereof, or a functionally active fragment thereof, or a homolog thereof, or a variant of “OS-9” encoded by a nucleic acid that hybridizes to the “OS-9” nucleic acid or its complement under low stringency conditions, and/or

[1920] (xx) “PDGFRB” (SEQ ID No:43) or a functionally active derivative thereof, or a functionally active fragment thereof, or a homolog thereof, or a variant of “PDGFRB” encoded by a nucleic acid that hybridizes to the “PDGFRB” nucleic acid or its complement under low stringency conditions, and/or

[1921] (xxi) “PTK7” (SEQ ID No:44) or a functionally active derivative thereof, or a functionally active fragment thereof, or a homolog thereof, or a variant of “PTK7” encoded by a nucleic acid that hybridizes to the “PTK7” nucleic acid or its complement under low stringency conditions, and/or

[1922] (xxii) “RetSDR2” (SEQ ID No:21) or a functionally active derivative thereof, or a functionally active fragment thereof, or a homolog thereof, or a variant of “RetSDR2” encoded by a nucleic acid that hybridizes to the “RetSDR2” nucleic acid or its complement under low stringency conditions, and/or

[1923] (xxiii) “S100alpha” (SEQ ID No:34) or a functionally active derivative thereof, or a functionally active fragment thereof, or a homolog thereof, or a variant of “S100alpha” encoded by a nucleic acid that hybridizes to the “S100alpha” nucleic acid or its complement under low stringency conditions, and/or

[1924] (xxiv) “SORL1” (SEQ ID No:25) or a functionally active derivative thereof, or a functionally active fragment thereof, or a homolog thereof, or a variant of “SORL1” encoded by a nucleic acid that hybridizes to the “SORL1” nucleic acid or its complement under low stringency conditions, and/or

[1925] (xxv) “stearoyl-CoA desaturase” (SEQ ID No:29) or a functionally active derivative thereof, or a functionally active fragment thereof, or a homolog thereof, or a variant of “stearoyl-CoA desaturase” encoded by a nucleic acid that hybridizes to the “stearoyl-CoA desaturase” nucleic acid or its complement under low stringency conditions, and/or

[1926] (xxvi) “TMP21” (SEQ ID No:30) or a functionally active derivative thereof, or a functionally active fragment thereof, or a homolog thereof, or a variant of “TMP21” encoded by a nucleic acid that hybridizes to the “TMP21” nucleic acid or its complement under low stringency conditions, and/or

[1927] (xxvii) “UGCGL1” (SEQ ID No:45) or a functionally active derivative thereof, or a functionally active fragment thereof, or a homolog thereof, or a variant of “UGCGL1” encoded by a nucleic acid that hybridizes to the “UGCGL1” nucleic acid or its complement under low stringency conditions, is present in the complex.

38. The complex of any one of No. 1-8, or the antibody or fragment of No. 15, for use in a method of diagnosing a disease or disorder such as neurodegenerative disease such as Alzheimer's disease.

[1928] 39. A method for treating or preventing a disease or disorder characterized by an aberrant amount of, activity or component composition of or intracellular localization of, the complex of anyone of No. 1-8, comprising administering to a subject in need of such treatment or prevention a therapeutically effective amount of one or more molecules that modulate the amount of, transactivation of a Gal4-driven reporter gene (e.g. by modifying the expression of one or several interacting proteins in cells by means of RNAi (siRNA) and/or plasmids encoding the interacting protein(s)), the production of Abeta-40 and Abeta-42 peptides by ELISA (e.g. by modifying the expression of one or several interacting proteins in cells by means of RNAi (siRNA) and/or plasmids encoding the interacting protein(s)), the production of C-terminal APP fragments in cell lines or transgenic animals by western blot (e.g. by modifying the expression of one or several interacting proteins in cells by means of RNAi (siRNA) and/or plasmids encoding the interacting protein(s)) or the proteolytic activity of beta- or gamma secretases towards bacterially expressed APP fragments in vitro (e.g. by modifying the expression of one or several interacting proteins in cells by means of RNAi (siRNA) and/or plasmids encoding the interacting protein(s)), or protein components of, said complex.

40. The method according to No. 39 wherein said disease or disorder involves decreased levels of the amount or activity of said complex.

41. The method according to No. 39 wherein said disease or disorder involves increased levels of the amount or activity of said complex.

42. Complex of any of No. 1-8 and/or protein selected from the following proteins

[1929] (i) “BACE1” (SEQ ID No:38) or a functionally active derivative thereof, or a functionally active fragment thereof, or a homolog thereof, or a variant of “BACE1” encoded by a nucleic acid that hybridizes to the “BACE1” nucleic acid or its complement under low stringency conditions,

[1930] (ii) “APP” (SEQ ID No:23) or a functionally active derivative thereof, or a functionally active fragment thereof, or a homolog thereof, or a variant of “APP” encoded by a nucleic acid that hybridizes to the “APP” nucleic acid or its complement under low stringency conditions,

[1931] (iii) “Nicastrin” (SEQ ID No:9) or a functionally active derivative thereof, or a functionally active fragment thereof, or a homolog thereof, or a variant of “Nicastrin” encoded by a nucleic acid that hybridizes to the “Nicastrin” nucleic acid or its complement under low stringency conditions,

[1932] (iv) “ACAT1” (SEQ ID No:4) or a functionally active derivative thereof, or a functionally active fragment thereof, or a homolog thereof, or a variant of “ACAT1” encoded by a nucleic acid that hybridizes to the “ACAT1” nucleic acid or its complement under low stringency conditions,

[1933] (v) “APLP2” (SEQ ID No:22) or a functionally active derivative thereof, or a functionally active fragment thereof, or a homolog thereof, or a variant of “APLP2” encoded by a nucleic acid that hybridizes to the “APLP2” nucleic acid or its complement under low stringency conditions,

[1934] (vi) “BRI” (SEQ ID No:5) or a functionally active derivative thereof, or a functionally active fragment thereof, or a homolog thereof, or a variant of “BRI” encoded by a nucleic acid that hybridizes to the “BRI” nucleic acid or its complement under low stringency conditions,

[1935] (vii) “calsyntenin 1” (SEQ ID No:6) or a functionally active derivative thereof, or a functionally active fragment thereof, or a homolog thereof, or a variant of “calsyntenin 1” encoded by a nucleic acid that hybridizes to the “calsyntenin 1” nucleic acid or its complement under low stringency conditions,

[1936] (viii) “CELSR2” (SEQ ID No:39) or a functionally active derivative thereof, or a functionally active fragment thereof, or a homolog thereof, or a variant of “CELSR2” encoded by a nucleic acid that hybridizes to the “CELSR2” nucleic acid or its complement under low stringency conditions,

[1937] (ix) “CGI-13” (SEQ ID No:72) or a functionally active derivative thereof, or a functionally active fragment thereof, or a homolog thereof, or a variant of “CGI-13” encoded by a nucleic acid that hybridizes to the “CGI-13” nucleic acid or its complement under low stringency conditions,

[1938] (x) “DLK1” (SEQ ID No:7) or a functionally active derivative thereof, or a functionally active fragment thereof, or a homolog thereof, or a variant of “DLK1” encoded by a nucleic acid that hybridizes to the “DLK1” nucleic acid or its complement under low stringency conditions,

[1939] (xi) “DSCD75” (SEQ ID No:8) or a functionally active derivative thereof, or a functionally active fragment thereof, or a homolog thereof, or a variant of “DSCD75” encoded by a nucleic acid that hybridizes to the “DSCD75” nucleic acid or its complement under low stringency conditions,

[1940] (xii) “FADS2” (SEQ ID No:40) or a functionally active derivative thereof, or a functionally active fragment thereof, or a homolog thereof, or a variant of “FADS2” encoded by a nucleic acid that hybridizes to the “FADS2” nucleic acid or its complement under low stringency conditions,

[1941] (xiii) “GPR49” (SEQ ID No:115) or a functionally active derivative thereof, or a functionally active fragment thereof, or a homolog thereof, or a variant of “GPR49” encoded by a nucleic acid that hybridizes to the “GPR49” nucleic acid or its complement under low stringency conditions,

[1942] (xiv) “ITM2C” (SEQ ID No:13) or a functionally active derivative thereof, or a functionally active fragment thereof, or a homolog thereof, or a variant of “ITM2C” encoded by a nucleic acid that hybridizes to the “ITM2C” nucleic acid or its complement under low stringency conditions,

[1943] (xv) “KiDins220” (SEQ ID No:17) or a functionally active derivative thereof, or a functionally active fragment thereof, or a homolog thereof, or a variant of “KiDins220” encoded by a nucleic acid that hybridizes to the “KiDins220” nucleic acid or its complement under low stringency conditions,

[1944] (xvi) “LAPTM4B” (SEQ ID No:33) or a functionally active derivative thereof, or a functionally active fragment thereof, or a homolog thereof, or a variant of “LAPTM4B” encoded by a nucleic acid that hybridizes to the “LAPTM4B” nucleic acid or its complement under low stringency conditions,

[1945] (xvii) “Neurotrypsin” (SEQ ID No:19) or a functionally active derivative thereof, or a functionally active fragment thereof, or a homolog thereof, or a variant of “Neurotrypsin” encoded by a nucleic acid that hybridizes to the “Neurotrypsin” nucleic acid or its complement under low stringency conditions,

[1946] (xviii) “NogoA” (SEQ ID No:41) or a functionally active derivative thereof, or a functionally active fragment thereof, or a homolog thereof, or a variant of “NogoA” encoded by a nucleic acid that hybridizes to the “NogoA” nucleic acid or its complement under low stringency conditions,

[1947] (xix) “OS-9” (SEQ ID No:42) or a functionally active derivative thereof, or a functionally active fragment thereof, or a homolog thereof, or a variant of “OS-9” encoded by a nucleic acid that hybridizes to the “OS-9” nucleic acid or its complement under low stringency conditions,

[1948] (xx) “PDGFRB” (SEQ ID No:43) or a functionally active derivative thereof, or a functionally active fragment thereof, or a homolog thereof, or a variant of “PDGFRB” encoded by a nucleic acid that hybridizes to the “PDGFRB” nucleic acid or its complement under low stringency conditions,

[1949] (xxi) “PTK7” (SEQ ID No:44) or a functionally active derivative thereof, or a functionally active fragment thereof, or a homolog thereof, or a variant of “PTK7” encoded by a nucleic acid that hybridizes to the “PTK7” nucleic acid or its complement under low stringency conditions,

[1950] (xxii) “RetSDR2” (SEQ ID No:21) or a functionally active derivative thereof, or a functionally active fragment thereof, or a homolog thereof, or a variant of “RetSDR2” encoded by a nucleic acid that hybridizes to the “RetSDR2” nucleic acid or its complement under low stringency conditions,

[1951] (xxiii) “S100alpha” (SEQ ID No:34) or a functionally active derivative thereof, or a functionally active fragment thereof, or a homolog thereof, or a variant of “S100alpha” encoded by a nucleic acid that hybridizes to the “S100alpha” nucleic acid or its complement under low stringency conditions,

[1952] (xxiv) “SORL1” (SEQ ID No:25) or a functionally active derivative thereof, or a functionally active fragment thereof, or a homolog thereof, or a variant of “SORL1” encoded by a nucleic acid that hybridizes to the “SORL1” nucleic acid or its complement under low stringency conditions,

[1953] (xxv) “stearoyl-CoA desaturase” (SEQ ID No:29) or a functionally active derivative thereof, or a functionally active fragment thereof, or a homolog thereof, or a variant of “stearoyl-CoA desaturase” encoded by a nucleic acid that hybridizes to the “stearoyl-CoA desaturase” nucleic acid or its complement under low stringency conditions,

[1954] (xxvi) “TMP21” (SEQ ID No:30) or a functionally active derivative thereof, or a functionally active fragment thereof, or a homolog thereof, or a variant of “TMP21” encoded by a nucleic acid that hybridizes to the “TMP21” nucleic acid or its complement under low stringency conditions,

[1955] (xxvii) “UGCGL1” (SEQ ID No:45) or a functionally active derivative thereof, or a functionally active fragment thereof, or a homolog thereof, or a variant of “UGCGL1” encoded by a nucleic acid that hybridizes to the “UGCGL1” nucleic acid or its complement under low stringency conditions, as a target for an active agent of a pharmaceutical, preferably a drug target in the treatment or prevention of a disease or disorder such as neurodegenerative disease such as Alzheimer's disease.

[1956] Furthermore, the present invention relates to the Psen2-complex

1. A protein complex selected from complex (not defined) and comprising

(a) at least one first protein selected from the group consisting of:

[1957] (i) “Psen2” (SEQ ID No:121) or a functionally active derivative thereof, or a functionally active fragment thereof, or a homolog thereof, or a variant of “Psen2” encoded by a nucleic acid that hybridizes to the “Psen2” nucleic acid or its complement under low stringency conditions,

[1958] (ii) “aph-1a” (SEQ ID No:1) or a functionally active derivative thereof, or a functionally active fragment thereof, or a homolog thereof, or a variant of “aph-1a” encoded by a nucleic acid that hybridizes to the “aph-1a” nucleic acid or its complement under low stringency conditions,

[1959] (iii) “Nicastrin” (SEQ ID No:9) or a functionally active derivative thereof, or a functionally active fragment thereof, or a homolog thereof, or a variant of “Nicastrin” encoded by a nucleic acid that hybridizes to the “Nicastrin” nucleic acid or its complement under low stringency conditions, and

(b) at least one first protein selected from the group consisting of:

[1960] (i) “CGI-13” (SEQ ID No:72) or a functionally active derivative thereof, or a functionally active fragment thereof, or a homolog thereof, or a variant of “CGI-13” encoded by a nucleic acid that hybridizes to the “CGI-13” nucleic acid or its complement under low stringency conditions,

[1961] (ii) “DSCD75” (SEQ ID No:8) or a functionally active derivative thereof, or a functionally active fragment thereof, or a homolog thereof, or a variant of “DSCD75” encoded by a nucleic acid that hybridizes to the “DSCD75” nucleic acid or its complement under low stringency conditions,

[1962] (iii) “ECSIT” (SEQ ID No:55) or a functionally active derivative thereof, or a functionally active fragment thereof, or a homolog thereof, or a variant of “ECSIT” encoded by a nucleic acid that hybridizes to the “ECSIT” nucleic acid or its complement under low stringency conditions,

[1963] (iv) “FACL3” (SEQ ID No:11) or a functionally active derivative thereof, or a functionally active fragment thereof, or a homolog thereof, or a variant of “FACL3” encoded by a nucleic acid that hybridizes to the “FACL3” nucleic acid or its complement under low stringency conditions,

[1964] (v) “FADS2” (SEQ ID No:40) or a functionally active derivative thereof, or a functionally active fragment thereof, or a homolog thereof, or a variant of “FADS2” encoded by a nucleic acid that hybridizes to the “FADS2” nucleic acid or its complement under low stringency conditions,

[1965] (vi) “FLJ10579” (SEQ ID No:12) or a functionally active derivative thereof, or a functionally active fragment thereof, or a homolog thereof, or a variant of “FLJ10579” encoded by a nucleic acid that hybridizes to the “FLJ10579” nucleic acid or its complement under low stringency conditions,

[1966] (vii) “FLJ20481” (SEQ ID No:82) or a functionally active derivative thereof, or a functionally active fragment thereof, or a homolog thereof, or a variant of “FLJ20481” encoded by a nucleic acid that hybridizes to the “FLJ20481” nucleic acid or its complement under low stringency conditions,

[1967] (viii) “ITPR1” (SEQ ID No:16) or a functionally active derivative thereof, or a functionally active fragment thereof, or a homolog thereof, or a variant of “ITPR1” encoded by a nucleic acid that hybridizes to the “ITPR1” nucleic acid or its complement under low stringency conditions,

[1968] (ix) “KIAA0090” (SEQ ID No:57) or a functionally active derivative thereof, or a functionally active fragment thereof, or a homolog thereof, or a variant of “KIAA0090” encoded by a nucleic acid that hybridizes to the “KIAA0090” nucleic acid or its complement under low stringency conditions,

[1969] (x) “MDR11” (SEQ ID No:18) or a functionally active derivative thereof, or a functionally active fragment thereof, or a homolog thereof, or a variant of “MDR1” encoded by a nucleic acid that hybridizes to the “MDR1” nucleic acid or its complement under low stringency conditions,

[1970] (xi) “NicAChRa3” (SEQ ID No:62) or a functionally active derivative thereof, or a functionally active fragment thereof, or a homolog thereof, or a variant of “NicAChRa3” encoded by a nucleic acid that hybridizes to the “NicAChRa3” nucleic acid or its complement under low stringency conditions,

[1971] (xii) “PLD3” (SEQ ID No:20) or a functionally active derivative thereof, or a functionally active fragment thereof, or a homolog thereof, or a variant of “PLD3” encoded by a nucleic acid that hybridizes to the “PLD3” nucleic acid or its complement under low stringency conditions,

[1972] (xiii) “SFXN1” (SEQ ID No:24) or a functionally active derivative thereof, or a functionally active fragment thereof, or a homolog thereof, or a variant of “SFXN1” encoded by a nucleic acid that hybridizes to the “SFXN1” nucleic acid or its complement under low stringency conditions,

[1973] (xiv) “SLC4A2” (SEQ ID No:63) or a functionally active derivative thereof, or a functionally active fragment thereof, or a homolog thereof, or a variant of “SLC4A2” encoded by a nucleic acid that hybridizes to the “SLC4A2” nucleic acid or its complement under low stringency conditions,

[1974] (xv) “SORT1” (SEQ ID No:15) or a functionally active derivative thereof, or a functionally active fragment thereof, or a homolog thereof, or a variant of “SORT1” encoded by a nucleic acid that hybridizes to the “SORT1” nucleic acid or its complement under low stringency conditions,

[1975] (xvi) “SPC18” (SEQ ID No:26) or a functionally active derivative thereof, or a functionally active fragment thereof, or a homolog thereof, or a variant of “SPC18” encoded by a nucleic acid that hybridizes to the “SPC18” nucleic acid or its complement under low stringency conditions,

[1976] (xvii) “SPC22” (SEQ ID No:27) or a functionally active derivative thereof, or a functionally active fragment thereof, or a homolog thereof, or a variant of “SPC22” encoded by a nucleic acid that hybridizes to the “SPC22” nucleic acid or its complement under low stringency conditions,

[1977] (xviii) “SPC25” (SEQ ID No:28) or a functionally active derivative thereof, or a functionally active fragment thereof, or a homolog thereof, or a variant of “SPC25” encoded by a nucleic acid that hybridizes to the “SPC25” nucleic acid or its complement under low stringency conditions,

[1978] (xix) “SPTLC2” (SEQ ID No:117) or a functionally active derivative thereof, or a functionally active fragment thereof, or a homolog thereof, or a variant of “SPTLC2” encoded by a nucleic acid that hybridizes to the “SPTLC2” nucleic acid or its complement under low stringency conditions,

[1979] (xx) “stearoyl-CoA desaturase” (SEQ ID No:29) or a functionally active derivative thereof, or a functionally active fragment thereof, or a homolog thereof, or a variant of “stearoyl-CoA desaturase” encoded by a nucleic acid that hybridizes to the “stearoyl-CoA desaturase” nucleic acid or its complement under low stringency conditions,

[1980] (xxi) “STT3” (SEQ ID No:61) or a functionally active derivative thereof, or a functionally active fragment thereof, or a homolog thereof, or a variant of “STT3” encoded by a nucleic acid that hybridizes to the “STT3” nucleic acid or its complement under low stringency conditions,

[1981] (xxii) “TMP21” (SEQ ID No:30) or a functionally active derivative thereof, or a functionally active fragment thereof, or a homolog thereof, or a variant of “TMP21” encoded by a nucleic acid that hybridizes to the “TMP21” nucleic acid or its complement under low stringency conditions,

[1982] (xxiii) “VLCAD” (SEQ ID No:31) or a functionally active derivative thereof, or a functionally active fragment thereof, or a homolog thereof, or a variant of “VLCAD” encoded by a nucleic acid that hybridizes to the “VLCAD” nucleic acid or its complement under low stringency conditions,

[1983] (xxiv) “Wolframin” (SEQ ID No:67) or a functionally active derivative thereof, or a functionally active fragment thereof, or a homolog thereof, or a variant of “Wolframin” encoded by a nucleic acid that hybridizes to the “Wolframin” nucleic acid or its complement under low stringency conditions,

[1984] (xxv) “YME1L1” (SEQ ID No:32) or a functionally active derivative thereof, or a functionally active fragment thereof, or a homolog thereof, or a variant of “YME1L1” encoded by a nucleic acid that hybridizes to the “YME1L1” nucleic acid or its complement under low stringency conditions, and a complex (II) comprising at least two of said second proteins, wherein said low stringency conditions comprise hybridization in a buffer comprising 35% formamide, 5×SSC, 50 mM Tris-HCI (pH 7.5), 5 mM EDTA, 0.02% PVP, 0.02% Ficoll, 0.2% BSA, 100 ug/ml denatured salmon sperm DNA, and 10% (wt/vol) dextran sulfate for 18-20 hours at 40 Celsius, washing in a buffer consisting of 2×SSC, 25 mM Tris-HCI (pH 7.4), 5 mM EDTA, and 0.1% SDS for 1.5 hours at 55 Celsius, and washing in a buffer consisting of 2×SSC, 25 mM Tris-HCI (pH 7.4), 5 mM EDTA, and 0.1% SDS for 1.5 hours at 60 Celsius.

[1985] 2. The protein complex according to No. 1 wherein the first protein is the protein Psen2 (SEQ ID No:121), or a functionally active derivative thereof, or a functionally active fragment thereof, or a homolog thereof, or a variant of ‘Psen2’ encoded by a nucleic acid that hybridizes to the ‘Psen2’ under low stringency conditions.

3. The protein complex according to No. 1-2 and comprising the following proteins:

[1986] (i) “Psen2” (SEQ ID No:121) or a functionally active derivative thereof, or a functionally active fragment thereof, or a homolog thereof, or a variant of “Psen2” encoded by a nucleic acid that hybridizes to the “Psen2” nucleic acid or its complement under low stringency conditions,

[1987] (ii) “aph-1a” (SEQ ID No:1) or a functionally active derivative thereof, or a functionally active fragment thereof, or a homolog thereof, or a variant of “aph-1a” encoded by a nucleic acid that hybridizes to the “aph-1a” nucleic acid or its complement under low stringency conditions,

[1988] (iii) “Nicastrin” (SEQ ID No:9) or a functionally active derivative thereof, or a functionally active fragment thereof, or a homolog thereof, or a variant of “Nicastrin” encoded by a nucleic acid that hybridizes to the “Nicastrin” nucleic acid or its complement under low stringency conditions,

[1989] (iv) “CGI-13” (SEQ ID No:72) or a functionally active derivative thereof, or a functionally active fragment thereof, or a homolog thereof, or a variant of “CGI-13” encoded by a nucleic acid that hybridizes to the “CGI-13” nucleic acid or its complement under low stringency conditions,

[1990] (v) “DSCD75” (SEQ ID No:8) or a functionally active derivative thereof, or a functionally active fragment thereof, or a homolog thereof, or a variant of “DSCD75” encoded by a nucleic acid that hybridizes to the “DSCD75” nucleic acid or its complement under low stringency conditions,

[1991] (vi) “ECSIT” (SEQ ID No:55) or a functionally active derivative thereof, or a functionally active fragment thereof, or a homolog thereof, or a variant of “ECSIT” encoded by a nucleic acid that hybridizes to the “ECSIT” nucleic acid or its complement under low stringency conditions,

[1992] (vii) “FACL3” (SEQ ID No:11) or a functionally active derivative thereof, or a functionally active fragment thereof, or a homolog thereof, or a variant of “FACL3” encoded by a nucleic acid that hybridizes to the “FACL3” nucleic acid or its complement under low stringency conditions,

[1993] (viii) “FADS2” (SEQ ID No:40) or a functionally active derivative thereof, or a functionally active fragment thereof, or a homolog thereof, or a variant of “FADS2” encoded by a nucleic acid that hybridizes to the “FADS2” nucleic acid or its complement under low stringency conditions,

[1994] (ix) “FLJ10579” (SEQ ID No:12) or a functionally active derivative thereof, or a functionally active fragment thereof, or a homolog thereof, or a variant of “FLJ10579” encoded by a nucleic acid that hybridizes to the “FLJ10579” nucleic acid or its complement under low stringency conditions,

[1995] (x) “FLJ20481” (SEQ ID No:82) or a functionally active derivative thereof, or a functionally active fragment thereof, or a homolog thereof, or a variant of “FLJ20481” encoded by a nucleic acid that hybridizes to the “FLJ20481” nucleic acid or its complement under low stringency conditions,

[1996] (xi) “ITPR1” (SEQ ID No:16) or a functionally active derivative thereof, or a functionally active fragment thereof, or a homolog thereof, or a variant of “ITPR1” encoded by a nucleic acid that hybridizes to the “ITPR1” nucleic acid or its complement under low stringency conditions,

[1997] (xii) “KIAA0090” (SEQ ID No:57) or a functionally active derivative thereof, or a functionally active fragment thereof, or a homolog thereof, or a variant of “KIAA0090” encoded by a nucleic acid that hybridizes to the “KIAA0090” nucleic acid or its complement under low stringency conditions,

[1998] (xiii) “MDR1” (SEQ ID No:18) or a functionally active derivative thereof, or a functionally active fragment thereof, or a homolog thereof, or a variant of “MDR1” encoded by a nucleic acid that hybridizes to the “MDR1” nucleic acid or its complement under low stringency conditions,

[1999] (xiv) “NicAChRa3” (SEQ ID No:62) or a functionally active derivative thereof, or a functionally active fragment thereof, or a homolog thereof, or a variant of “NicAChRa3” encoded by a nucleic acid that hybridizes to the “NicAChRa3” nucleic acid or its complement under low stringency conditions,

[2000] (xv) “PLD3” (SEQ ID No:20) or a functionally active derivative thereof, or a functionally active fragment thereof, or a homolog thereof, or a variant of “PLD3” encoded by a nucleic acid that hybridizes to the “PLD3.” nucleic acid or its complement under low stringency conditions,

[2001] (xvi) “SFXN1” (SEQ ID No:24) or a functionally active derivative thereof, or a functionally active fragment thereof, or a homolog thereof, or a variant of “SFXN1” encoded by a nucleic acid that hybridizes to the “SFXN1” nucleic acid or its complement under low stringency conditions,

[2002] (xvii) “SLC4A2” (SEQ ID No:63) or a functionally active derivative thereof, or a functionally active fragment thereof, or a homolog thereof, or a variant of “SLC4A2” encoded by a nucleic acid that hybridizes to the “SLC4A2” nucleic acid or its complement under low stringency conditions,

[2003] (xviii) “SORT1” (SEQ ID No:15) or a functionally active derivative thereof, or a functionally active fragment thereof, or a homolog thereof, or a variant of “SORT1” encoded by a nucleic acid that hybridizes to the “SORT1” nucleic acid or its complement under low stringency conditions,

[2004] (xix) “SPC18” (SEQ ID No:26) or a functionally active derivative thereof, or a functionally active fragment thereof, or a homolog thereof, or a variant of “SPC18” encoded by a nucleic acid that hybridizes to the “SPC18” nucleic acid or its complement under low stringency conditions,

[2005] (xx) “SPC22” (SEQ ID No:27) or a functionally active derivative thereof, or a functionally active fragment thereof, or a homolog thereof, or a variant of “SPC22” encoded by a nucleic acid that hybridizes to the “SPC22” nucleic acid or its complement under low stringency conditions,

[2006] (xxi) “SPC25” (SEQ ID No:28) or a functionally active derivative thereof, or a functionally active fragment thereof, or a homolog thereof, or a variant of “SPC25” encoded by a nucleic acid that hybridizes to the “SPC25” nucleic acid or its complement under low stringency conditions,

[2007] (xxii) “SPTLC2” (SEQ ID No:117) or a functionally active derivative thereof, or a functionally active fragment thereof, or a homolog thereof, or a variant of “SPTLC2” encoded by a nucleic acid that hybridizes to the “SPTLC2” nucleic acid or its complement under low stringency conditions,

[2008] (xxiii) “stearoyl-CoA desaturase” (SEQ ID No:29) or a functionally active derivative thereof, or a functionally active fragment thereof, or a homolog thereof, or a variant of “stearoyl-CoA desaturase” encoded by a nucleic acid that hybridizes to the “stearoyl-CoA desaturase” nucleic acid or its complement under low stringency conditions,

[2009] (xxiv) “STT3” (SEQ ID No:61) or a functionally active derivative thereof, or a functionally active fragment thereof, or a homolog thereof, or a variant of “STT3” encoded by a nucleic acid that hybridizes to the “STT3” nucleic acid or its complement under low stringency conditions,

[2010] (xxv) “TMP21” (SEQ ID No:30) or a functionally active derivative thereof, or a functionally active fragment thereof, or a homolog thereof, or a variant of “TMP21” encoded by a nucleic acid that hybridizes to the “TMP21” nucleic acid or its complement under low stringency conditions,

[2011] (xxvi) “VLCAD” (SEQ ID No:31) or a functionally active derivative thereof, or a functionally active fragment thereof, or a homolog thereof, or a variant of “VLCAD” encoded by a nucleic acid that hybridizes to the “VLCAD” nucleic acid or its complement under low stringency conditions,

[2012] (xxvii) “Wolframin” (SEQ ID No:67) or a functionally active derivative thereof, or a functionally active fragment thereof, or a homolog thereof, or a variant of “Wolframin” encoded by a nucleic acid that hybridizes to the “Wolframin” nucleic acid or its complement under low stringency conditions,

[2013] (xxviii) “YME1L1” (SEQ ID No:32) or a functionally active derivative thereof, or a functionally active fragment thereof, or a homolog thereof, or a variant of “YME1L1” encoded by a nucleic acid that hybridizes to the “YME1L1” nucleic acid or its complement under low stringency conditions.

4. The protein complex according to No. 1 comprising all but 1-25 of the following proteins:

[2014] (i) “Psen2” (SEQ ID No:121) or a functionally active derivative thereof, or a functionally active fragment thereof, or a homolog thereof, or a variant of “Psen2” encoded by a nucleic acid that hybridizes to the “Psen2” nucleic acid or its complement under low stringency conditions,

[2015] (ii) “aph-1a” (SEQ ID No:1) or a functionally active derivative thereof, or a functionally active fragment thereof, or a homolog thereof, or a variant of “aph-1a” encoded by a nucleic acid that hybridizes to the “aph-1a” nucleic acid or its complement under low stringency conditions,

[2016] (iii) “Nicastrin” (SEQ ID No:9) or a functionally active derivative thereof, or a functionally active fragment thereof, or a homolog thereof, or a variant of “Nicastrin” encoded by a nucleic acid that hybridizes to the “Nicastrin” nucleic acid or its complement under low stringency conditions,

[2017] (iv) “CGI-13” (SEQ ID No:72) or a functionally active derivative thereof, or a functionally active fragment thereof, or a homolog thereof, or a variant of “CGI-13” encoded by a nucleic acid that hybridizes to the “CGI-13” nucleic acid or its complement under low stringency conditions,

[2018] (v) “DSCD75” (SEQ ID No:8) or a functionally active derivative thereof, or a functionally active fragment thereof, or a homolog thereof, or a variant of “DSCD75” encoded by a nucleic acid that hybridizes to the “DSCD75” nucleic acid or its complement under low stringency conditions,

[2019] (vi) “ECSIT” (SEQ ID No:55) or a functionally active derivative thereof, or a functionally active fragment thereof, or a homolog thereof, or a variant of “ECSIT” encoded by a nucleic acid that hybridizes to the “ECSIT” nucleic acid or its complement under low stringency conditions,

[2020] (vii) “FACL3” (SEQ ID No:11) or a functionally active derivative thereof, or a functionally active fragment thereof, or a homolog thereof, or a variant of “FACL3” encoded by a nucleic acid that hybridizes to the “FACL3” nucleic acid or its complement under low stringency conditions,

[2021] (viii) “FADS2” (SEQ ID No:40) or a functionally active derivative thereof, or a functionally active fragment thereof, or a homolog thereof, or a variant of “FADS2” encoded by a nucleic acid that hybridizes to the “FADS2” nucleic acid or its complement under low stringency conditions,

[2022] (ix) “FLJ10579” (SEQ ID No:12) or a functionally active derivative thereof, or a functionally active fragment thereof, or a homolog thereof, or a variant of “FLJ10579” encoded by a nucleic acid that hybridizes to the “FLJ10579” nucleic acid or its complement under low stringency conditions,

[2023] (x) “FLJ20481” (SEQ ID No:82) or a functionally active derivative thereof, or a functionally active fragment thereof, or a homolog thereof, or a variant of “FLJ20481” encoded by a nucleic acid that hybridizes to the “FLJ20481” nucleic acid or its complement under low stringency conditions,

[2024] (xi) “ITPR1” (SEQ ID No:16) or a functionally active derivative thereof, or a functionally active fragment thereof, or a homolog thereof, or a variant of “ITPR1” encoded by a nucleic acid that hybridizes to the “ITPR1” nucleic acid or its complement under low stringency conditions,

[2025] (xii) “KIAA0090” (SEQ ID No:57) or a functionally active derivative thereof, or a functionally active fragment thereof, or a homolog thereof, or a variant of “KIAA0090” encoded by a nucleic acid that hybridizes to the “KIAA0090” nucleic acid or its complement under low stringency conditions,

[2026] (xiii) “MDR1” (SEQ ID No:18) or a functionally active derivative thereof, or a functionally active fragment thereof, or a homolog thereof, or a variant of “MDR1” encoded by a nucleic acid that hybridizes to the “MDR1” nucleic acid or its complement under low stringency conditions,

[2027] (xiv) “NicAChRa3” (SEQ ID No:62) or a functionally active derivative thereof, or a functionally active fragment thereof, or a homolog thereof, or a variant of “NicAChRa3” encoded by a nucleic acid that hybridizes to the “NicAChRa3” nucleic acid or its complement under low stringency conditions,

[2028] (xv) “PLD3” (SEQ ID No:20) or a functionally active derivative thereof, or a functionally active fragment thereof, or a homolog thereof, or a variant of “PLD3” encoded by a nucleic acid that hybridizes to the “PLD3” nucleic acid or its complement under low stringency conditions,

[2029] (xvi) “SFXN1” (SEQ ID No:24) or a functionally active derivative thereof, or a functionally active fragment thereof, or a homolog thereof, or a variant of “SFXN1” encoded by a nucleic acid that hybridizes to the “SFXN1” nucleic acid or its complement under low stringency conditions,

[2030] (xvii) “SLC4A2” (SEQ ID No:63) or a functionally active derivative thereof, or a functionally active fragment thereof, or a homolog thereof, or a variant of “SLC4A2” encoded by a nucleic acid that hybridizes to the “SLC4A2” nucleic acid or its complement under low stringency conditions,

[2031] (xviii) “SORT1” (SEQ ID No:15) or a functionally active derivative thereof, or a functionally active fragment thereof, or a homolog thereof, or a variant of “SORT1” encoded by a nucleic acid that hybridizes to the “SORT1” nucleic acid or its complement under low stringency conditions,

[2032] (xix) “SPC18” (SEQ ID No:26) or a functionally active derivative thereof, or a functionally active fragment thereof, or a homolog thereof, or a variant of “SPC18” encoded by a nucleic acid that hybridizes to the “SPC18” nucleic acid or its complement under low stringency conditions,

[2033] (xx) “SPC22” (SEQ ID No:27) or a functionally active derivative thereof, or a functionally active fragment thereof, or a homolog thereof, or a variant of “SPC22” encoded by a nucleic acid that hybridizes to the “SPC22” nucleic acid or its complement under low stringency conditions,

[2034] (xxi) “SPC25” (SEQ ID No:28) or a functionally active derivative thereof, or a functionally active fragment thereof, or a homolog thereof, or a variant of “SPC25” encoded by a nucleic acid that hybridizes to the “SPC25” nucleic acid or its complement under low stringency conditions,

[2035] (xxii) “SPTLC2” (SEQ ID No:117) or a functionally active derivative thereof, or a functionally active fragment thereof, or a homolog thereof, or a variant of “SPTLC2” encoded by a nucleic acid that hybridizes to the “SPTLC2” nucleic acid or its complement under low stringency conditions,

[2036] (xxiii) “stearoyl-CoA desaturase” (SEQ ID No:29) or a functionally active derivative thereof, or a functionally active fragment thereof, or a homolog thereof, or a variant of “stearoyl-CoA desaturase” encoded by a nucleic acid that hybridizes to the “stearoyl-CoA desaturase” nucleic acid or its complement under low stringency conditions,

[2037] (xxiv) “STT3” (SEQ ID No:61) or a functionally active derivative thereof, or a functionally active fragment thereof, or a homolog thereof, or a variant of “STT3” encoded by a nucleic acid that hybridizes to the “STT3” nucleic acid or its complement under low stringency conditions,

[2038] (xxv) “TMP21” (SEQ ID No:30) or a functionally active derivative thereof, or a functionally active fragment thereof, or a homolog thereof, or a variant of “TMP21” encoded by a nucleic acid that hybridizes to the “TMP21” nucleic acid or its complement under low stringency conditions,

[2039] (xxvi) “VLCAD” (SEQ ID No:31) or a functionally active derivative thereof, or a functionally active fragment thereof, or a homolog thereof, or a variant of “VLCAD” encoded by a nucleic acid that hybridizes to the “VLCAD” nucleic acid or its complement under low stringency conditions,

[2040] (xxvii) “Wolframin” (SEQ ID No:67) or a functionally active derivative thereof, or a functionally active fragment thereof, or a homolog thereof, or a variant of “Wolframin” encoded by a nucleic acid that hybridizes to the “Wolframin” nucleic acid or its complement under low stringency conditions,

[2041] (xxviii) “YME1L1” (SEQ ID No:32) or a functionally active derivative thereof, or a functionally active fragment thereof, or a homolog thereof, or a variant of “YME1L1” encoded by a nucleic acid that hybridizes to the “YME1L1” nucleic acid or its complement under low stringency conditions.

[2042] 5. The complex of any of No. 1-4 comprising a functionally active derivative of said first protein and/or a functionally active derivative of said second protein, wherein the functionally active derivative is a fusion protein comprising said first protein or said second protein fused to an amino acid sequence different from the first protein or second protein, respectively.

6. The complex of No. 5 wherein the functionally active derivative is a fusion protein comprising said first protein or said second protein fused to an affinity tag or label.

7. The complex of any of No. 1-4 comprising a fragment of said first protein and/or a fragment of said second protein, which fragment binds to another protein component of said complex.

[2043] 8. The complex of any of No. 1-7 that is involved in the transactivation of a Gal4-driven reporter gene (e.g. by modifying the expression of one or several interacting proteins in cells by means of RNAi (siRNA) and/or plasmids encoding the interacting protein(s)), the production of Abeta-40 and Abeta-42 peptides by ELISA (e.g. by modifying the expression of one or several interacting proteins in cells by means of RNAi (siRNA) and/or plasmids encoding the interacting protein(s)), the production of C-terminal APP fragments in cell lines or transgenic animals by western blot (e.g. by modifying the expression of one or several interacting proteins in cells by means of RNAi (siRNA) and/or plasmids encoding the interacting protein(s)) or the proteolytic activity of beta- or gamma secretases towards bacterially expressed APP fragments in vitro (e.g. by modifying the expression of one or several interacting proteins in cells by means of RNAi (siRNA) and/or plasmids encoding the interacting protein(s)).

[2044] 9. A process for preparing a complex of any of No. 1-8 and optionally the components thereof comprising the following steps: expressing a protein (bait) of the complex, preferably a tagged protein, in a target cell, isolating the protein complex which is attached to the bait protein, and optionally dissociating the protein complex and isolating the individual complex members.

10. The process according to No. 9 wherein the tagged protein comprises two different tags which allow two separate affinity purification steps.

11. The process according to any of No. 9-10 wherein the two tags are separated by a cleavage site for a protease.

12. Component of the Fe65 complex obtainable by a process according to any of No. 9-11.

[2045] 13. Construct, preferably a vector construct, comprising at least two separate nucleic acid sequences each encoding a different protein, or a functionally active fragment or a functionally active derivative of at least one of said proteins, or functionally active fragments or functionally active derivative thereof being selected from the first group of proteins according to No. 1 (a) and at least one of said proteins, or functionally active fragments or functionally active derivative thereof being selected from the second group of proteins according to No. 1 (b).

[2046] 14. Host cell, containing a construct of No. 13 or containing several vectors each comprising at least the nucleic acid sequence encoding at least one of the proteins, or functionally active fragments or functionally active derivatives thereof selected from the first group of proteins according to No. 1 (a) and the proteins, or functionally active fragments or functionally active derivatives thereof selected from the second group of proteins according to No. 1 (b).

[2047] 15. An antibody or a fragment of said antibody containing the binding domain thereof, selected from an antibody or fragment thereof, which binds the complex of any of No. 1-8 and which does not bind any of the proteins of said complex when uncomplexed.

16. A kit comprising in one or more container the complex of any of No. 1-8 optionally together with an antibody according to No. 15 and/or further components such as reagents and working instructions.

17. The kit according to No. 16 for processing a substrate of said complex.

18. The kit according to No. 16 for the diagnosis or prognosis of a disease or a disease risk, preferentially for a disease or disorder such as neurodegenerative disease such as Alzheimer's disease.

19. Array, in which at least a complex according to any of No. 1-8 and/or at least one antibody according to No. 15 is attached to a solid carrier.

20. A process for processing a physiological substrate of the complex comprising the step of bringing into contact a complex to any of No. 1-8 with said substrate, such that said substrate is processed.

21. A pharmaceutical composition comprising the protein complex of any of No. 1-8 and/or any of the following the proteins:

[2048] (i) “Psen2” (SEQ ID No:121) or a functionally active derivative thereof, or a functionally active fragment thereof, or a homolog thereof, or a variant of “Psen2” encoded by a nucleic acid that hybridizes to the “Psen2” nucleic acid or its complement under low stringency conditions,

[2049] (ii) “aph-1a” (SEQ ID No:1) or a functionally active derivative thereof, or a functionally active fragment thereof, or a homolog thereof, or a variant of “aph-1a” encoded by a nucleic acid that hybridizes to the “aph-1a” nucleic acid or its complement under low stringency conditions,

[2050] (iii) “Nicastrin” (SEQ ID No:9) or a functionally active derivative thereof, or a functionally active fragment thereof, or a homolog thereof, or a variant of “Nicastrin” encoded by a nucleic acid that hybridizes to the “Nicastrin” nucleic acid or its complement under low stringency conditions,

[2051] (iv) “CGI-13” (SEQ ID No:72) or a functionally active derivative thereof, or a functionally active fragment thereof, or a homolog thereof, or a variant of “CGI-13” encoded by a nucleic acid that hybridizes to the “CGI-13” nucleic acid or its complement under low stringency conditions,

[2052] (v) “DSCD75” (SEQ ID No:8) or a functionally active derivative thereof, or a functionally active fragment thereof, or a homolog thereof, or a variant of “DSCD75” encoded by a nucleic acid that hybridizes to the “DSCD75” nucleic acid or its complement under low stringency conditions,

[2053] (vi) “ECSIT” (SEQ ID No:55) or a functionally active derivative thereof, or a functionally active fragment thereof, or a homolog thereof, or a variant of “ECSIT” encoded by a nucleic acid that hybridizes to the “ECSIT” nucleic acid or its complement under low stringency conditions,

[2054] (vii) “FACL3” (SEQ ID No:11) or a functionally active derivative thereof, or a functionally active fragment thereof, or a homolog thereof, or a variant of “FACL3” encoded by a nucleic acid that hybridizes to the “FACL3” nucleic acid or its complement under low stringency conditions,

[2055] (viii) “FADS2” (SEQ ID No:40) or a functionally active derivative thereof, or a functionally active fragment thereof, or a homolog thereof, or a variant of “FADS2” encoded by a nucleic acid that hybridizes to the “FADS2” nucleic acid or its complement under low stringency conditions,

[2056] (ix) “FLJ10579” (SEQ ID No:12) or a functionally active derivative thereof, or a functionally active fragment thereof, or a homolog thereof, or a variant of “FLJ10579” encoded by a nucleic acid that hybridizes to the “FLJ10579” nucleic acid or its complement under low stringency conditions,

[2057] (x) “FLJ20481” (SEQ ID No:82) or a functionally active derivative thereof, or a functionally active fragment thereof, or a homolog thereof, or a variant of “FLJ20481” encoded by a nucleic acid that hybridizes to the “FLJ20481” nucleic acid or its complement under low stringency conditions,

[2058] (xi) “ITPR1” (SEQ ID No:16) or a functionally active derivative thereof, or a functionally active fragment thereof, or a homolog thereof, or a variant of “ITPR1” encoded by a nucleic acid that hybridizes to the “ITPR1” nucleic acid or its complement under low stringency conditions,

[2059] (xii) “KIAA0090” (SEQ ID No:57) or a functionally active derivative thereof, or a functionally active fragment thereof, or a homolog thereof, or a variant of “KIAA0090” encoded by a nucleic acid that hybridizes to the “KIAA0090” nucleic acid or its complement under low stringency conditions,

[2060] (xiii) “MDR1” (SEQ ID No:18) or a functionally active derivative thereof, or a functionally active fragment thereof, or a homolog thereof, or a variant of “MDR1” encoded by a nucleic acid that hybridizes to the “MDR1” nucleic acid or its complement under low stringency conditions,

[2061] (xiv) “NicAChRa3” (SEQ ID No:62) or a functionally active derivative thereof, or a functionally active fragment thereof, or a homolog thereof, or a variant of “NicAChRa3” encoded by a nucleic acid that hybridizes to the “NicAChRa3” nucleic acid or its complement under low stringency conditions,

[2062] (xv) “PLD3” (SEQ ID No:20) or a functionally active derivative thereof, or a functionally active fragment thereof, or a homolog thereof, or a variant of “PLD3” encoded by a nucleic acid that hybridizes to the “PLD3” nucleic acid or its complement under low stringency conditions,

[2063] (xvi) “SFXN1” (SEQ ID No:24) or a functionally active derivative thereof, or a functionally active fragment thereof, or a homolog thereof, or a variant of “SFXN1” encoded by a nucleic acid that hybridizes to the “SFXN1” nucleic acid or its complement under low stringency conditions,

[2064] (xvii) “SLC4A2” (SEQ ID No:63) or a functionally active derivative thereof, or a functionally active fragment thereof, or a homolog thereof, or a variant of “SLC4A2” encoded by a nucleic acid that hybridizes to the “SLC4A2” nucleic acid or its complement under low stringency conditions,

[2065] (xviii) “SORT1” (SEQ ID No:15) or a functionally active derivative thereof, or a functionally active fragment thereof, or a homolog thereof, or a variant of “SORT1” encoded by a nucleic acid that hybridizes to the “SORT1” nucleic acid or its complement under low stringency conditions,

[2066] (xix) “SPC18” (SEQ ID No:26) or a functionally active derivative thereof, or a functionally active fragment thereof, or a homolog thereof, or a variant of “SPC18” encoded by a nucleic acid that hybridizes to the “SPC18” nucleic acid or its complement under low stringency conditions,

[2067] (xx) “SPC22” (SEQ ID No:27) or a functionally active derivative thereof, or a functionally active fragment thereof, or a homolog thereof, or a variant of “SPC22” encoded by a nucleic acid that hybridizes to the “SPC22” nucleic acid or its complement under low stringency conditions,

[2068] (xxi) “SPC25” (SEQ ID No:28) or a functionally active derivative thereof, or a functionally active fragment thereof, or a homolog thereof, or a variant of “SPC25” encoded by a nucleic acid that hybridizes to the “SPC25” nucleic acid or its complement under low stringency conditions,

[2069] (xxii) “SPTLC2” (SEQ ID No:117) or a functionally active derivative thereof, or a functionally active fragment thereof, or a homolog thereof, or a variant of “SPTLC2” encoded by a nucleic acid that hybridizes to the “SPTLC2” nucleic acid or its complement under low stringency conditions,

[2070] (xxiii) “stearoyl-CoA desaturase” (SEQ ID No:29) or a functionally active derivative thereof, or a functionally active fragment thereof, or a homolog thereof, or a variant of “stearoyl-CoA desaturase” encoded by a nucleic acid that hybridizes to the “stearoyl-CoA desaturase” nucleic acid or its complement under low stringency conditions,

[2071] (xxiv) “STT3” (SEQ ID No:61) or a functionally active derivative thereof, or a functionally active fragment thereof, or a homolog thereof, or a variant of “STT3” encoded by a nucleic acid that hybridizes to the “STT3” nucleic acid or its complement under low stringency conditions,

[2072] (xxv) “TMP21” (SEQ ID No:30) or a functionally active derivative thereof, or a functionally active fragment thereof, or a homolog thereof, or a variant of “TMP1” encoded by a nucleic acid that hybridizes to the “TMP21” nucleic acid or its complement under low stringency conditions,

[2073] (xxvi) “VLCAD” (SEQ ID No:31) or a functionally active derivative thereof, or a functionally active fragment thereof, or a homolog thereof, or a variant of “VLCAD” encoded by a nucleic acid that hybridizes to the “VLCAD” nucleic acid or its complement under low stringency conditions,

[2074] (xxvii) “Wolframin” (SEQ ID No:67) or a functionally active derivative thereof, or a functionally active fragment thereof, or a homolog thereof, or a variant of “Wolframin” encoded by a nucleic acid that hybridizes to the “Wolframin” nucleic acid or its complement under low stringency conditions,

[2075] (xxviii) “YME1L1” (SEQ ID No:32) or a functionally active derivative thereof, or a functionally active fragment thereof, or a homolog thereof, or a variant of “YME1L1” encoded by a nucleic acid that hybridizes to the “YME1L1” nucleic acid or its complement under low stringency conditions., and a pharmaceutical acceptable carrier.

22. A pharmaceutical composition according to No. 21 for the treatment of diseases and disorders such as neurodegenerative disease such as Alzheimer's disease.

[2076] 23. A method for screening for a molecule that modulates directly or indirectly the function, activity, composition or formation of the complex of any one of No. 1-8 comprising the steps of: (a) exposing said complex, or a cell or organism containing Psen2-complex to one or more candidate molecules; and

[2077] (b) determining the amount of activity of protein components of, and/or intracellular localization of, said complex and/or the transcription level of a gene dependent on the complex and/or the abundance and/or activity of a protein or protein complex dependent on the function of the complex and/or product of a gene dependent on the complex in the presence of the one or more candidate molecules, wherein a change in said amount, activity, protein components or intracellular localization relative to said amount, activity, protein components and/or intracellular localization and/or a change in the transcription level of a gene dependent on the complex and/or the abundance and/or activity of a protein or protein complex dependent on the function of the complex and/or product of a gene dependent on the complex in the absence of said candidate molecules indicates that the molecule modulates function, activity or composition of said complex.

24. The method of No. 23, wherein the amount of said complex is determined.

25. The method of No. 23 wherein the activity of said complex is determined.

[2078] 26. The method of No. 25 wherein said determining step comprises isolating from the cell or organism said complex to produce said isolated complex and contacting said isolated complex in the presence or absence of a candidate molecule with a substrate of said complex and determining the processing of said substrate is modified in the presence of said candidate molecule.

27. The method of No. 24 wherein the amount of the individual protein components of said complex are determined.

28. The method of No. 27 wherein said determining step comprises determining whether

[2079] (i) “Psen2” (SEQ ID No:121) or a functionally active derivative thereof, or a functionally active fragment thereof, or a homolog thereof, or a variant of “Psen2” encoded by a nucleic acid that hybridizes to the “Psen2” nucleic acid or its complement under low stringency conditions, and/or

[2080] (ii) “aph-1a” (SEQ ID No:1) or a functionally active derivative thereof, or a functionally active fragment thereof, or a homolog thereof, or a variant of “aph-1a” encoded by a nucleic acid that hybridizes to the “aph-1a” nucleic acid or its complement under low stringency conditions, and/or

[2081] (iii) “Nicastrin” (SEQ ID No:9) or a functionally active derivative thereof, or a functionally active fragment thereof, or a homolog thereof, or a variant of “Nicastrin” encoded by a nucleic acid that hybridizes to the “Nicastrin” nucleic acid or its complement under low stringency conditions, and/or

[2082] (iv) “CGI-13” (SEQ ID No:72) or a functionally active derivative thereof, or a functionally active fragment thereof, or a homolog thereof, or a variant of “CGI-13” encoded by a nucleic acid that hybridizes to the “CGI-13” nucleic acid or its complement under low stringency conditions, and/or

[2083] (v) “DSCD75” (SEQ ID No:8) or a functionally active derivative thereof, or a functionally active fragment thereof, or a homolog thereof, or a variant of “DSCD75” encoded by a nucleic acid that hybridizes to the “DSCD75” nucleic acid or its complement under low stringency conditions, and/or

[2084] (vi) “ECSIT” (SEQ ID No:55) or a functionally active derivative thereof, or a functionally active fragment thereof, or a homolog thereof, or a variant of “ECSIT” encoded by a nucleic acid that hybridizes to the “ECSIT” nucleic acid or its complement under low stringency conditions, and/or

[2085] (vii) “FACL3” (SEQ ID No:11) or a functionally active derivative thereof, or a functionally active fragment thereof, or a homolog thereof, or a variant of “FACL3” encoded by a nucleic acid that hybridizes to the “FACL3” nucleic acid or its complement under low stringency conditions, and/or

[2086] (viii) “FADS2” (SEQ ID No:40) or a functionally active derivative thereof, or a functionally active fragment thereof, or a homolog thereof, or a variant of “FADS2” encoded by a nucleic acid that hybridizes to the “FADS2” nucleic acid or its complement under low stringency conditions, and/or

[2087] (ix) “FLJ10579” (SEQ ID No:12) or a functionally active derivative thereof, or a functionally active fragment thereof, or a homolog thereof, or a variant of “FLJ10579” encoded by a nucleic acid that hybridizes to the “FLJ10579” nucleic acid or its complement under low stringency conditions, and/or

[2088] (x) “FLJ20481” (SEQ ID No:82) or a functionally active derivative thereof, or a functionally active fragment thereof, or a homolog thereof, or a variant of “FLJ20481” encoded by a nucleic acid that hybridizes to the “FLJ20481” nucleic acid or its complement under low stringency conditions, and/or

[2089] (xi) “ITPR1” (SEQ ID No:16) or a functionally active derivative thereof, or a functionally active fragment thereof, or a homolog thereof, or a variant of “ITPR1” encoded by a nucleic acid that hybridizes to the “ITPR1” nucleic acid or its complement under low stringency conditions, and/or

[2090] (xii) “KIAA0090” (SEQ ID No:57) or a functionally active derivative thereof, or a functionally active fragment thereof, or a homolog thereof, or a variant of “KIAA0090” encoded by a nucleic acid that hybridizes to the “KIAA0090” nucleic acid or its complement under low stringency conditions, and/or

[2091] (xiii) “MDR1” (SEQ ID No:18) or a functionally active derivative thereof, or a functionally active fragment thereof, or a homolog thereof, or a variant of “MDR1” encoded by a nucleic acid that hybridizes to the “MDR1” nucleic acid or its complement under low stringency conditions, and/or

[2092] (xiv) “NicAChRa3” (SEQ ID No:62) or a functionally active derivative thereof, or a functionally active fragment thereof, or a homolog thereof, or a variant of “NicAChRa3” encoded by a nucleic acid that hybridizes to the “NicAChRa3” nucleic acid or its complement under low stringency conditions, and/or

[2093] (xv) “PLD3” (SEQ ID No:20) or a functionally active derivative thereof, or a functionally active fragment thereof, or a homolog thereof, or a variant of “PLD3” encoded by a nucleic acid that hybridizes to the “PLD3” nucleic acid or its complement under low stringency conditions, and/or

[2094] (xvi) “SFXN1” (SEQ ID No:24) or a functionally active derivative thereof, or a functionally active fragment thereof, or a homolog thereof, or a variant of “SFXN1” encoded by a nucleic acid that hybridizes to the “SFXN1” nucleic acid or its complement under low stringency conditions, and/or

[2095] (xvii) “SLC4A2” (SEQ ID No:63) or a functionally active derivative thereof, or a functionally active fragment thereof, or a homolog thereof, or a variant of “SLC4A2” encoded by a nucleic acid that hybridizes to the “SLC4A2” nucleic acid or its complement under low stringency conditions, and/or

[2096] (xviii) “SORT1” (SEQ ID No:15) or a functionally active derivative thereof, or a functionally active fragment thereof, or a homolog thereof, or a variant of “SORT1” encoded by a nucleic acid that hybridizes to the “SORT1” nucleic acid or its complement under low stringency conditions, and/or

[2097] (xix) “SPC18” (SEQ ID No:26) or a functionally active derivative thereof, or a functionally active fragment thereof, or a homolog thereof, or a variant of “SPC18” encoded by a nucleic acid that hybridizes to the “SPC18” nucleic acid or its complement under low stringency conditions, and/or

[2098] (xx) “SPC22” (SEQ ID No:27) or a functionally active derivative thereof, or a functionally active fragment thereof, or a homolog thereof, or a variant of “SPC22” encoded by a nucleic acid that hybridizes to the “SPC22” nucleic acid or its complement under low stringency conditions, and/or

[2099] (xxi) “SPC25” (SEQ ID No:28) or a functionally active derivative thereof, or a functionally active fragment thereof, or a homolog thereof, or a variant of “SPC25” encoded by a nucleic acid that hybridizes to the “SPC25” nucleic acid or its complement under low stringency conditions, and/or

[2100] (xxii) “SPTLC2” (SEQ ID No:117) or a functionally active derivative thereof, or a functionally active fragment thereof, or a homolog thereof, or a variant of “SPTLC2” encoded by a nucleic acid that hybridizes to the “SPTLC2” nucleic acid or its complement under low stringency conditions, and/or

[2101] (xxiii) “stearoyl-CoA desaturase” (SEQ ID No:29) or a functionally active derivative thereof, or a functionally active fragment thereof, or a homolog thereof, or a variant of “stearoyl-CoA desaturase” encoded by a nucleic acid that hybridizes to the “stearoyl-CoA desaturase” nucleic acid or its complement under low stringency conditions, and/or

[2102] (xxiv) “STT3” (SEQ ID No:61) or a functionally active derivative thereof, or a functionally active fragment thereof, or a homolog thereof, or a variant of “STT3” encoded by a nucleic acid that hybridizes to the “STT3” nucleic acid or its complement under low stringency conditions, and/or

[2103] (xxv) “TMP21” (SEQ ID No:30) or a functionally active derivative thereof, or a functionally active fragment thereof, or a homolog thereof, or a variant of “TMP21” encoded by a nucleic acid that hybridizes to the “TMP21” nucleic acid or its complement under low stringency conditions, and/or

[2104] (xxvi) “VLCAD” (SEQ ID No:31) or a functionally active derivative thereof, or a functionally active fragment thereof, or a homolog thereof, or a variant of “VLCAD” encoded by a nucleic acid that hybridizes to the “VLCAD” nucleic acid or its complement under low stringency conditions, and/or

[2105] (xxvii) “Wolframin” (SEQ ID No:67) or a functionally active derivative thereof, or a functionally active fragment thereof, or a homolog thereof, or a variant of “Wolframin” encoded by a nucleic acid that hybridizes to the “Wolframin” nucleic acid or its complement under low stringency conditions, and/or

[2106] (xxviii) “YME1L1” (SEQ ID No:32) or a functionally active derivative thereof, or a functionally active fragment thereof, or a homolog thereof, or a variant of “YME1L1” encoded by a nucleic acid that hybridizes to the “YME1L1” nucleic acid or its complement under low stringency conditions, is present in the complex.

29. The method of any of No. 23-28 wherein said method is a method of screening for a drug for treatment or prevention of a disease or disorder such as neurodegenerative disease such as Alzheimer's disease.

[2107] 30. Use of a molecule that modulates the amount of, activity of, or the protein components of the complex of any one of No. 1-8 for the manufacture of a medicament for the treatment or prevention of a disease or disorder such as neurodegenerative disease such as Alzheimer's disease.

[2108] 31. A method for the production of a pharmaceutical composition comprising carrying out the method of any of No. 1-8 to identify a molecule that modulates the function, activity, composition or formation of said complex, and further comprising mixing the identified molecule with a pharmaceutically acceptable carrier.

[2109] 32. A method for diagnosing or screening for the presence of a disease or disorder or a predisposition for developing a disease or disorder in a subject, which disease or disorder is characterized by an aberrant amount of, activity of, or component composition of, or intracellular localization of the complex of any one of the No. 1-8, comprising determining the amount of, activity of, protein components of, and/or intracellular localization of, said complex and/or the transcription level of a gene dependent on the complex and/or the abundance and/or activity of a protein or protein complex dependent on the function of the complex and/or product of a gene dependent on the complex in a comparative sample derived from a subject, wherein a difference in said amount, activity, or protein components of, said complex in an analogous sample from a subject not having the disease or disorder or predisposition indicates the presence in the subject of the disease or disorder or predisposition in the subject.

33. The method of No. 32 wherein the amount of said complex is determined.

34. The method of No. 32 wherein the activity of said complex is determined.

[2110] 35. The method of No. 34 wherein said determining step comprises isolating from the subject said complex to produce said isolated complex and contacting said isolated complex in the presence or absence of a candidate molecule with a substrate of said complex and determining whether said substrate is processed in the absence of the candidate molecule and whether the processing of said substrate is modified in the presence of said candidate molecule.

36. The method of No. 32 wherein the amount of the individual protein components of said complex is determined.

37. The method of No. 36 wherein said determining step comprises determining whether

[2111] (i) “Psen2” (SEQ ID No:121) or a functionally active derivative thereof, or a functionally active fragment thereof, or a homolog thereof, or a variant of “Psen2” encoded by a nucleic acid that hybridizes to the “Psen2” nucleic acid or its complement under low stringency conditions, and/or

[2112] (ii) “aph-1a” (SEQ ID No:1) or a functionally active derivative thereof, or a functionally active fragment thereof, or a homolog thereof, or a variant of “aph-1a” encoded by a nucleic acid that hybridizes to the “aph-1a” nucleic acid or its complement under low stringency conditions, and/or

[2113] (iii) “Nicastrin” (SEQ ID No:9) or a functionally active derivative thereof, or a functionally active fragment thereof, or a homolog thereof, or a variant of “Nicastrin” encoded by a nucleic acid that hybridizes to the “Nicastrin” nucleic acid or its complement under low stringency conditions, and/or

[2114] (iv) “CGI-13” (SEQ ID No:72) or a functionally active derivative thereof, or a functionally active fragment thereof, or a homolog thereof, or a variant of “CGI-13” encoded by a nucleic acid that hybridizes to the “CGI-13” nucleic acid or its complement under low stringency conditions, and/or

[2115] (v) “DSCD75” (SEQ ID No:8) or a functionally active derivative thereof, or a functionally active fragment thereof, or a homolog thereof, or a variant of “DSCD75” encoded by a nucleic acid that hybridizes to the “DSCD75” nucleic acid or its complement under low stringency conditions, and/or

[2116] (vi) “ECSIT” (SEQ ID No:55) or a functionally active derivative thereof, or a functionally active fragment thereof, or a homolog thereof, or a variant of “ECSIT” encoded by a nucleic acid that hybridizes to the “ECSIT” nucleic acid or its complement under low stringency conditions, and/or

[2117] (vii) “FACL3” (SEQ ID No:11) or a functionally active derivative thereof, or a functionally active fragment thereof, or a homolog thereof, or a variant of “FACL3” encoded by a nucleic acid that hybridizes to the “FACL3” nucleic acid or its complement under low stringency conditions, and/or

[2118] (viii) “FADS2” (SEQ ID No:40) or a functionally active derivative thereof, or a functionally active fragment thereof, or a homolog thereof, or a variant of “FADS2” encoded by a nucleic acid that hybridizes to the “FADS2” nucleic acid or its complement under low stringency conditions, and/or

[2119] (ix) “FLJ10579” (SEQ ID No:12) or a functionally active derivative thereof, or a functionally active fragment thereof, or a homolog thereof, or a variant of “FLJ10579” encoded by a nucleic acid that hybridizes to the “FLJ10579” nucleic acid or its complement under low stringency conditions, and/or

[2120] (x) “FLJ20481” (SEQ ID No:82) or a functionally active derivative thereof, or a functionally active fragment thereof, or a homolog thereof, or a variant of “FLJ20481” encoded by a nucleic acid that hybridizes to the “FLJ20481” nucleic acid or its complement under low stringency conditions, and/or

[2121] (xi) “ITPR1” (SEQ ID No:16) or a functionally active derivative thereof, or a functionally active fragment thereof, or a homolog thereof, or a variant of “ITPR1” encoded by a nucleic acid that hybridizes to the “ITPR1” nucleic acid or its complement under low stringency conditions, and/or

[2122] (xii) “KIAA0090” (SEQ ID No:57) or a functionally active derivative thereof, or a functionally active fragment thereof, or a homolog thereof, or a variant of “KIAA0090” encoded by a nucleic acid that hybridizes to the “KIAA0090” nucleic acid or its complement under low stringency conditions, and/or

[2123] (xiii) “MDR1” (SEQ ID No:18) or a functionally active derivative thereof, or a functionally active fragment thereof, or a homolog thereof, or a variant of “MDR1” encoded by a nucleic acid that hybridizes to the “MDR1” nucleic acid or its complement under low stringency conditions, and/or

[2124] (xiv) “NicAChRa3” (SEQ ID No:62) or a functionally active derivative thereof, or a functionally active fragment thereof, or a homolog thereof, or a variant of “NicAChRa3” encoded by a nucleic acid that hybridizes to the “NicAChRa3” nucleic acid or its complement under low stringency conditions, and/or

[2125] (xv) “PLD3” (SEQ ID No:20) or a functionally active derivative thereof, or a functionally active fragment thereof, or a homolog thereof, or a variant of “PLD3” encoded by a nucleic acid that hybridizes to the “PLD3” nucleic acid or its complement under low stringency conditions, and/or

[2126] (xvi) “SFXN1” (SEQ ID No:24) or a functionally active derivative thereof, or a functionally active fragment thereof, or a homolog thereof, or a variant of “SFXN1” encoded by a nucleic acid that hybridizes to the “SFXN1” nucleic acid or its complement under low stringency conditions, and/or

[2127] (xvii) “SLC4A2” (SEQ ID No:63) or a functionally active derivative thereof, or a functionally active fragment thereof, or a homolog thereof, or a variant of “SLC4A2” encoded by a nucleic acid that hybridizes to the “SLC4A2” nucleic acid or its complement under low stringency conditions, and/or

[2128] (xviii) “SORT1” (SEQ ID No:15) or a functionally active derivative thereof, or a functionally active fragment thereof, or a homolog thereof, or a variant of “SORT1” encoded by a nucleic acid that hybridizes to the “SORT1” nucleic acid or its complement under low stringency conditions, and/or

[2129] (xix) “SPC18” (SEQ ID No:26) or a functionally active derivative thereof, or a functionally active fragment thereof, or a homolog thereof, or a variant of “SPC18” encoded by a nucleic acid that hybridizes to the “SPC18” nucleic acid or its complement under low stringency conditions, and/or

[2130] (xx) “SPC22” (SEQ ID No:27) or a functionally active derivative thereof, or a functionally active fragment thereof, or a homolog thereof, or a variant of “SPC22” encoded by a nucleic acid that hybridizes to the “SPC22” nucleic acid or its complement under low stringency conditions, and/or

[2131] (xxi) “SPC25” (SEQ ID No:28) or a functionally active derivative thereof, or a functionally active fragment thereof, or a homolog thereof, or a variant of “SPC25” encoded by a nucleic acid that hybridizes to the “SPC25” nucleic acid or its complement under low stringency conditions, and/or

[2132] (xxii) “SPTLC2” (SEQ ID No:117) or a functionally active derivative thereof, or a functionally active fragment thereof, or a homolog thereof, or a variant of “SPTLC2” encoded by a nucleic acid that hybridizes to the “SPTLC2” nucleic acid or its complement under low stringency conditions, and/or

[2133] (xxiii) “stearoyl-CoA desaturase” (SEQ ID No:29) or a functionally active derivative thereof, or a functionally active fragment thereof, or a homolog thereof, or a variant of “stearoyl-CoA desaturase” encoded by a nucleic acid that hybridizes to the “stearoyl-CoA desaturase” nucleic acid or its complement under low stringency conditions, and/or

[2134] (xxiv) “STT3” (SEQ ID No:61) or a functionally active derivative thereof, or a functionally active fragment thereof, or a homolog thereof, or a variant of “STT3” encoded by a nucleic acid that hybridizes to the “STT3” nucleic acid or its complement under low stringency conditions, and/or

[2135] (xxv) “TMP21” (SEQ ID No:30) or a functionally active derivative thereof, or a functionally active fragment thereof, or a homolog thereof, or a variant of “TMP21” encoded by a nucleic acid that hybridizes to the “TMP21” nucleic acid or its complement under low stringency conditions, and/or

[2136] (xxvi) “VLCAD” (SEQ ID No:31) or a functionally active derivative thereof, or a functionally active fragment thereof, or a homolog thereof, or a variant of “VLCAD” encoded by a nucleic acid that hybridizes to the “VLCAD” nucleic acid or its complement under low stringency conditions, and/or

[2137] (xxvii) “Wolframin” (SEQ ID No:67) or a functionally active derivative thereof, or a functionally active fragment thereof, or a homolog thereof, or a variant of “Wolframin” encoded by a nucleic acid that hybridizes to the “Wolframin” nucleic acid or its complement under low stringency conditions, and/or

[2138] (xxviii) “YME1L1” (SEQ ID No:32) or a functionally active derivative thereof, or a functionally active fragment thereof, or a homolog thereof, or a variant of “YME1L1” encoded by a nucleic acid that hybridizes to the “YME1L1” nucleic acid or its complement under low stringency conditions, is present in the complex.

38. The complex of any one of No. 1-8, or the antibody or fragment of No. 15, for use in a method of diagnosing a disease or disorder such as neurodegenerative disease such as Alzheimer's disease.

[2139] 39. A method for treating or preventing a disease or disorder characterized by an aberrant amount of, activity or component composition of or intracellular localization of, the complex of anyone of No. 1-8, comprising administering to a subject in need of such treatment or prevention a therapeutically effective amount of one or more molecules that modulate the amount of, transactivation of a Gal4-driven reporter gene (e.g. by modifying the expression of one or several interacting proteins in cells by means of RNAi. (siRNA) and/or plasmids encoding the interacting protein(s)), the production of Abeta-40 and Abeta-42 peptides by ELISA (e.g. by modifying the expression of one or several interacting proteins in cells by means of RNAi (siRNA) and/or plasmids encoding the interacting protein(s)), the production of C-terminal APP fragments in cell lines or transgenic animals by western blot (e.g. by modifying the expression of one or several interacting proteins in cells by means of RNAi (siRNA) and/or plasmids encoding the interacting protein(s)) or the proteolytic activity of beta- or gamma secretases towards bacterially expressed APP fragments in vitro (e.g. by modifying the expression of one or several interacting proteins in cells by means of RNAi (siRNA) and/or plasmids encoding the interacting protein(s)), or protein components of, said complex.

40. The method according to No. 39 wherein said disease or disorder involves decreased levels of the amount or activity of said complex.

41. The method according to No. 39 wherein said disease or disorder involves increased levels of the amount or activity of said complex.

42. Complex of any of No. 1-8 and/or protein selected from the following proteins

[2140] (i) “Psen2” (SEQ ID No:121) or a functionally active derivative thereof, or a functionally active fragment thereof, or a homolog thereof, or a variant of “Psen2” encoded by a nucleic acid that hybridizes to the “Psen2” nucleic acid or its complement under low stringency conditions,

[2141] (ii) “aph-1a” (SEQ ID No:1) or a functionally active derivative thereof, or a functionally active fragment thereof, or a homolog thereof, or a variant of “aph-1a” encoded by a nucleic acid that hybridizes to the “aph-1a” nucleic acid or its complement under low stringency conditions,

[2142] (iii) “Nicastrin” (SEQ ID No:9) or a functionally active derivative thereof, or a functionally active fragment thereof, or a homolog thereof, or a variant of “Nicastrin” encoded by a nucleic acid that hybridizes to the “Nicastrin” nucleic acid or its complement under low stringency conditions,

[2143] (iv) “CGI-13” (SEQ ID No:72) or a functionally active derivative thereof, or a functionally active fragment thereof, or a homolog thereof, or a variant of “CGI-13” encoded by a nucleic acid that hybridizes to the “CGI-13” nucleic acid or its complement under low stringency conditions,

[2144] (v) “DSCD75” (SEQ ID No:8) or a functionally active derivative thereof, or a functionally active fragment thereof, or a homolog thereof, or a variant of “DSCD75” encoded by a nucleic acid that hybridizes to the “DSCD75” nucleic acid or its complement under low stringency conditions,

[2145] (vi) “ECSIT” (SEQ ID No:55) or a functionally active derivative thereof, or a functionally active fragment thereof, or a homolog thereof, or a variant of “ECSIT” encoded by a nucleic acid that hybridizes to the “ECSIT” nucleic acid or its complement under low stringency conditions,

[2146] (vii) “FACL3” (SEQ D No:11) or a functionally active derivative thereof, or a functionally active fragment thereof, or a homolog thereof, or a variant of “FACL3” encoded by a nucleic acid that hybridizes to the “FACL3” nucleic acid or its complement under low stringency conditions,

[2147] (viii) “FADS2” (SEQ ID No:40) or a functionally active derivative thereof, or a functionally active fragment thereof, or a homolog thereof, or a variant of “FADS2” encoded by a nucleic acid that hybridizes to the “FADS2” nucleic acid or its complement under low stringency conditions,

[2148] (ix) “FLJ10579” (SEQ ID No:12) or a functionally active derivative thereof, or a functionally active fragment thereof, or a homolog thereof, or a variant of “FLJ10579” encoded by a nucleic acid that hybridizes to the “FLJ10579” nucleic acid or its complement under low stringency conditions,

[2149] (x) “FLJ20481” (SEQ ID No:82) or a functionally active derivative thereof, or a functionally active fragment thereof, or a homolog thereof, or a variant of “FLJ20481” encoded by a nucleic acid that hybridizes to the “FLJ20481” nucleic acid or its complement under low stringency conditions,

[2150] (xi) “ITPR1” (SEQ ID No:16) or a functionally active derivative thereof, or a functionally active fragment thereof, or a homolog thereof, or a variant of “ITPR1” encoded by a nucleic acid that hybridizes to the “ITPR1” nucleic acid or its complement under low stringency conditions,

[2151] (xii) “KIAA0090” (SEQ ID No:57) or a functionally active derivative thereof, or a functionally active fragment thereof, or a homolog thereof, or a variant of “KIAA0090” encoded by a nucleic acid that hybridizes to the “KIAA0090” nucleic acid or its complement under low stringency conditions,

[2152] (xviii) “MDR1” (SEQ ID No:18) or a functionally active derivative thereof, or a functionally active fragment thereof, or a homolog thereof, or a variant of “MDR1” encoded by a nucleic acid that hybridizes to the “MDR1” nucleic acid or its complement under low stringency conditions,

[2153] (xiv) “NicAChRa3” (SEQ ID No:62) or a functionally active derivative thereof, or a functionally active fragment thereof, or a homolog thereof, or a variant of “NicAChRa3” encoded by a nucleic acid that hybridizes to the “NicAChRa3” nucleic acid or its complement under low stringency conditions,

[2154] (xv) “PLD3” (SEQ ID No:20) or a functionally active derivative thereof, or a functionally active fragment thereof, or a homolog thereof, or a variant of “PLD3” encoded by a nucleic acid that hybridizes to the “PLD3” nucleic acid or its complement under low stringency conditions,

[2155] (xvi) “SFXN1” (SEQ ID No:24) or a functionally active derivative thereof, or a functionally active fragment thereof, or a homolog thereof, or a variant of “SFXN1” encoded by a nucleic acid that hybridizes to the “SFXN1” nucleic acid or its complement under low stringency conditions,

[2156] (xvii) “SLC4A2” (SEQ ID No:63) or a functionally active derivative thereof, or a functionally active fragment thereof, or a homolog thereof, or a variant of “SLC4A2” encoded by a nucleic acid that hybridizes to the “SLC4A2” nucleic acid or its complement under low stringency conditions,

[2157] (xviii) “SORT1” (SEQ ID No:15) or a functionally active derivative thereof, or a functionally active fragment thereof, or a homolog thereof, or a variant of “SORT1” encoded by a nucleic acid that hybridizes to the “SORT1” nucleic acid or its complement under low stringency conditions,

[2158] (xix) “SPC18” (SEQ ID No:26) or a functionally active derivative thereof, or a functionally active fragment thereof, or a homolog thereof, or a variant of “SPC18” encoded by a nucleic acid that hybridizes to the “SPC18” nucleic acid or its complement under low stringency conditions,

[2159] (xx) “SPC22” (SEQ ID No:27) or a functionally active derivative thereof, or a functionally active fragment thereof, or a homolog thereof, or a variant of “SPC22” encoded by a nucleic acid that hybridizes to the “SPC22” nucleic acid or its complement under low stringency conditions,

[2160] (xxi) “SPC25” (SEQ ID No:28) or a functionally active derivative thereof, or a functionally active fragment thereof, or a homolog thereof, or a variant of “SPC25” encoded by a nucleic acid that hybridizes to the “SPC25” nucleic acid or its complement under low stringency conditions,

[2161] (xxii) “SPTLC2” (SEQ ID No:117) or a functionally active derivative thereof, or a functionally active fragment thereof, or a homolog thereof, or a variant of “SPTLC2” encoded by a nucleic acid that hybridizes to the “SPTLC2” nucleic acid or its complement under low stringency conditions,

[2162] (xxiii) “stearoyl-CoA desaturase”, (SEQ ID No:29) or a functionally active derivative thereof, or a functionally active fragment thereof, or a homolog thereof, or a variant of “stearoyl-CoA desaturase” encoded by a nucleic acid that hybridizes to the “stearoyl-CoA desaturase” nucleic acid or its complement under low stringency conditions,

[2163] (xxiv) “STT3” (SEQ ID No:61) or a functionally active derivative thereof, or a functionally active fragment thereof, or a homolog thereof, or a variant of “STT3” encoded by a nucleic acid that hybridizes to the “STT3” nucleic acid or its complement under low stringency conditions,

[2164] (xxv) “TMP21” (SEQ ID No:30) or a functionally active derivative thereof, or a functionally active fragment thereof, or a homolog thereof, or a variant of “TMP21” encoded by a nucleic acid that hybridizes to the “TMP21” nucleic acid or its complement under low stringency conditions,

[2165] (xxvi) “VLCAD” (SEQ ID No:31) or a functionally active derivative thereof, or a functionally active fragment thereof, or a homolog thereof, or a variant of “VLCAD” encoded by a nucleic acid that hybridizes to the “VLCAD” nucleic acid or its complement under low stringency conditions,

[2166] (xxvii) “Wolframin” (SEQ ID No:67) or a functionally active derivative thereof, or a functionally active fragment thereof, or a homolog thereof, or a variant of “Wolframin” encoded by a nucleic acid that hybridizes to the “Wolframin” nucleic acid or its complement under low stringency conditions,

[2167] (xxviii) “YME1L” (SEQ ID No:32) or a functionally active derivative thereof, or a functionally active fragment thereof, or a homolog thereof, or a variant of “YME1L1” encoded by a nucleic acid that hybridizes to the “YME1L1” nucleic acid or its complement under low stringency conditions, as a target for an active agent of a pharmaceutical, preferably a drug target in the treatment or prevention of a disease or disorder such as neurodegenerative disease such as Alzheimer's disease.

[2168] Furthermore, the present invention relates to the PTK7-complex

1. A protein complex selected from complex (not defined) and comprising

(a) at least one first protein selected from the group consisting of:

[2169] (i) “PTK7” (SEQ ID No:44) or a functionally active derivative thereof, or a functionally active fragment thereof, or a homolog thereof, or a variant of “PTK7” encoded by a nucleic acid that hybridizes to the “PTK7” nucleic acid or its complement under low stringency conditions,

[2170] (ii) “APP” (SEQ ID No:23) or a functionally active derivative thereof, or a functionally active fragment thereof, or a homolog thereof, or a variant of “APP” encoded by a nucleic acid that hybridizes to the “APP” nucleic acid or its complement under low stringency conditions, and

(b) at least one first protein selected from the group consisting of:

[2171] (i) “BRI” (SEQ ID No:5) or a functionally active derivative thereof, or a functionally active fragment thereof, or a homolog thereof, or a variant of “BRI” encoded by a nucleic acid that hybridizes to the “BRI” nucleic acid or its complement under low stringency conditions,

[2172] (ii) “CELSR2” (SEQ ID No:39) or a functionally active derivative thereof, or a functionally active fragment thereof, or a homolog thereof, or a variant of “CELSR2” encoded by a nucleic acid that hybridizes to the “CELSR2” nucleic acid or its complement under low stringency conditions,

[2173] (iii) “DLK1” (SEQ ID No:7) or a functionally active derivative thereof, or a functionally active fragment thereof, or a homolog thereof, or a variant of “DLK1” encoded by a nucleic acid that hybridizes to the “DLK1” nucleic acid or its complement under low stringency conditions,

[2174] (iv) “FADS2” (SEQ ID No:40) or a functionally active derivative thereof, or a functionally active fragment thereof, or a homolog thereof, or a variant of “FADS2” encoded by a nucleic acid that hybridizes to the “FADS2” nucleic acid or its complement under low stringency conditions,

[2175] (v) “HIFPH3/EGLN3” (SEQ ID No:64) or a functionally active derivative thereof, or a functionally active fragment thereof, or a homolog thereof, or a variant of “HIFPH3/EGLN3” encoded by a nucleic acid that hybridizes to the “HIFPH3/EGLN3” nucleic acid or its complement under low stringency conditions,

[2176] (vi) “ITM2C” (SEQ ID No:13) or a functionally active derivative thereof, or a functionally active fragment thereof, or a homolog thereof, or a variant of “ITM2C” encoded by a nucleic acid that hybridizes to the “ITM2C” nucleic acid or its complement under low stringency conditions,

[2177] (vii) “Nap1-like” (SEQ ID No:116) or a functionally active derivative thereof, or a functionally active fragment thereof, or a homolog thereof, or a variant of “Nap1-like” encoded by a nucleic acid that hybridizes to the “Nap1-like” nucleic acid or its complement under low stringency conditions,

[2178] (viii) “Reelin” (SEQ ID No:51) or a functionally active derivative thereof, or a functionally active fragment thereof, or a homolog thereof, or a variant of “Reelin” encoded by a nucleic acid that hybridizes to the “Reelin” nucleic acid or its complement under low stringency conditions, and a complex (II) comprising at least two of said second proteins, wherein said low stringency conditions comprise hybridization in a buffer comprising 35% formamide, 5×SSC, 50 mM Tris-HCI (pH 7.5), 5 mM EDTA, 0.02% PVP, 0.02% Ficoll, 0.2% BSA, 100 ug/ml denatured salmon sperm DNA, and 10% (wt/vol) dextran sulfate for 18-20 hours at 40 Celsius, washing in a buffer consisting of 2×SSC, 25 mM Tris-HCI (pH 7.4), 5 mM EDTA, and 0.1% SDS for 1.5 hours at 55 Celsius, and washing in a buffer consisting of 2×SSC, 25 mM Tris-HCI (pH 7.4), 5 mM EDTA, and 0.1% SDS for 1.5 hours at 60 Celsius.

[2179] 2. The protein complex according to No. 1 wherein the first protein is the protein PTK7 (SEQ ID No:44), or a functionally active derivative thereof, or a functionally active fragment thereof, or a homolog thereof, or a variant of ‘PTK7’ encoded by a nucleic acid that hybridizes to the ‘PTK7’ under low stringency conditions.

3. The protein complex according to No. 1-2 and comprising the following proteins:

[2180] (i) “PTK7” (SEQ ID No:44) or a functionally active derivative thereof, or a functionally active fragment thereof, or a homolog thereof, or a variant of “PTK7” encoded by a nucleic acid that hybridizes to the “PTK7” nucleic acid or its complement under low stringency conditions,

[2181] (ii) “APP” (SEQ ID No:23) or a functionally active derivative thereof, or a functionally active fragment thereof, or a homolog thereof, or a variant of “APP” encoded by a nucleic acid that hybridizes to the “APP” nucleic acid or its complement under low stringency conditions,

[2182] (iii) “BRI” (SEQ ID No:5) or a functionally active derivative thereof, or a functionally active fragment thereof, or a homolog thereof, or a variant of “BRI” encoded by a nucleic acid that hybridizes to the “BRI” nucleic acid or its complement under low stringency conditions,

[2183] (iv) “CELSR2” (SEQ ID No:39) or a functionally active derivative thereof, or a functionally active fragment thereof, or a homolog thereof, or a variant of “CELSR2” encoded by a nucleic acid that hybridizes to the “CELSR2” nucleic acid or its complement under low stringency conditions,

[2184] (v) “DLK1” (SEQ ID No:7) or a functionally active derivative thereof, or a functionally active fragment thereof, or a homolog thereof, or a variant of “DLK1” encoded by a nucleic acid that hybridizes to the “DLK1” nucleic acid or its complement under low stringency conditions,

[2185] (vi) “FADS2” (SEQ ID No:40) or a functionally active derivative thereof, or a functionally active fragment thereof, or a homolog thereof, or a variant of “FADS2” encoded by a nucleic acid that hybridizes to the “FADS2” nucleic acid or its complement under low stringency conditions,

[2186] (vii) “HIFPH3/EGLN3” (SEQ ID No:64) or a functionally active derivative thereof, or a functionally active fragment thereof, or a homolog thereof, or a variant of “HIFPH3/EGLN3” encoded by a nucleic acid that hybridizes to the “HIFPH3/EGLN3” nucleic acid or its complement under low stringency conditions,

[2187] (viii) “ITM2C” (SEQ ID No:13) or a functionally active derivative thereof, or a functionally active fragment thereof, or a homolog thereof, or a variant of “ITM2C” encoded by a nucleic acid that hybridizes to the “ITM2C” nucleic acid or its complement under low stringency conditions,

[2188] (ix) “Nap1-like” (SEQ ID No:116) or a functionally active derivative thereof, or a functionally active fragment thereof, or a homolog thereof, or a variant of “Nap1-like” encoded by a nucleic acid that hybridizes to the “Nap1-like” nucleic acid or its complement under low stringency conditions,

[2189] (x) “Reelin” (SEQ ID No:51) or a functionally active derivative thereof, or a functionally active fragment thereof, or a homolog thereof, or a variant of “Reelin” encoded by a nucleic acid that hybridizes to the “Reelin” nucleic acid or its complement under low stringency conditions.

4. The protein complex according to No. 1 comprising all but 1-8 of the following proteins:

[2190] (i) “PTK7” (SEQ ID No:44) or a functionally active derivative thereof, or a functionally active fragment thereof, or a homolog thereof, or a variant of “PTK7” encoded by a nucleic acid that hybridizes to the “PTK7” nucleic acid or its complement under low stringency conditions,

[2191] (ii) “APP” (SEQ ID No:23) or a functionally active derivative thereof, or a functionally active fragment thereof, or a homolog thereof, or a variant of “APP” encoded by a nucleic acid that hybridizes to the “APP” nucleic acid or its complement under low stringency conditions,

[2192] (iii) “BRI” (SEQ ID No:5) or a functionally active derivative thereof, or a functionally active fragment thereof, or a homolog thereof, or a variant of “BRI” encoded by a nucleic acid that hybridizes to the “BRI” nucleic acid or its complement under low stringency conditions,

[2193] (iv) “CELSR2” (SEQ ID No:39) or a functionally active derivative thereof, or a functionally active fragment thereof, or a homolog thereof, or a variant of “CELSR2” encoded by a nucleic acid that hybridizes to the “CELSR2” nucleic acid or its complement under low stringency conditions,

[2194] (v) “DLK1” (SEQ ID No:7) or a functionally active derivative thereof, or a functionally active fragment thereof, or a homolog thereof, or a variant of “DLK1” encoded by a nucleic acid that hybridizes to the “DLK1” nucleic acid or its complement under low stringency conditions,

[2195] (vi) “FADS2” (SEQ ID No:40) or a functionally active derivative thereof, or a functionally active fragment thereof, or a homolog thereof, or a variant of “FADS2” encoded by a nucleic acid that hybridizes to the “FADS2” nucleic acid or its complement under low stringency conditions,

[2196] (vii) “HIFPH3/EGLN3” (SEQ ID No:64) or a functionally active derivative thereof, or a functionally active fragment thereof, or a homolog thereof, or a variant of “HIFPH3/EGLN3” encoded by a nucleic acid that hybridizes to the “HIFPH3/EGLN3” nucleic acid or its complement under low stringency conditions,

[2197] (viii) “ITM2C” (SEQ ID No:13) or a functionally active derivative thereof, or a functionally active fragment thereof, or a homolog thereof, or a variant of “ITM2C” encoded by a nucleic acid that hybridizes to the “ITM2C” nucleic acid or its complement under low stringency conditions,

[2198] (ix) “Nap1-like” (SEQ ID No:116) or a functionally active derivative thereof, or a functionally active fragment thereof, or a homolog thereof, or a variant of “Nap1-like” encoded by a nucleic acid that hybridizes to the “Nap1-like” nucleic acid or its complement under low stringency conditions,

[2199] (x) “Reelin” (SEQ ID No:51) or a functionally active derivative thereof, or a functionally active fragment thereof, or a homolog thereof, or a variant of “Reelin” encoded by a nucleic acid that hybridizes to the “Reelin” nucleic acid or its complement under low stringency conditions.

[2200] 5. The complex of any of No. 1-4 comprising a functionally active derivative of said first protein and/or a functionally active derivative of said second protein, wherein the functionally active derivative is a fusion protein comprising said first protein or said second protein fused to an amino acid sequence different from the first protein or second protein, respectively.

6. The complex of No. 5 wherein the functionally active derivative is a fusion protein comprising said first protein or said second protein fused to an affinity tag or label.

7. The complex of any of No. 1-4 comprising a fragment of said first protein and/or a fragment of said second protein, which fragment binds to another protein component of said complex.

[2201] 8. The complex of any of No. 1-7 that is involved in the transactivation of a Gal4-driven reporter gene (e.g. by modifying the expression of one or several interacting proteins in cells by means of RNAi (siRNA) and/or plasmids encoding the interacting protein(s)), the production of Abeta-40 and Abeta-42 peptides by ELISA (e.g. by modifying the expression of one or several interacting proteins in cells by means of RNAi (siRNA) and/or plasmids encoding the interacting protein(s)), the production of C-terminal APP fragments in cell lines or transgenic animals by western blot (e.g. by modifying the expression of one or several interacting proteins in cells by means of RNAi (siRNA) and/or plasmids encoding the interacting protein(s)) or the proteolytic activity of beta- or gamma secretases towards bacterially expressed APP fragments in vitro (e.g. by modifying the expression of one or several interacting proteins in cells by means of RNAi (siRNA) and/or plasmids encoding the interacting protein(s)).

[2202] 9. A process for preparing a complex of any of No. 1-8 and optionally the components thereof comprising the following steps: expressing a protein (bait) of the complex, preferably a tagged protein, in a target cell, isolating the protein complex which is attached to the bait protein, and optionally dissociating the protein complex and isolating the individual complex members.

10. The process according to No. 9 wherein the tagged protein comprises two different tags which allow two separate affinity purification steps.

11. The process according to any of No. 9-10 wherein the two tags are separated by a cleavage site for a protease.

12. Component of the Fe65 complex obtainable by a process according to any of No. 9-11.

[2203] 13. Construct, preferably a vector construct, comprising at least two separate nucleic acid sequences each encoding a different protein, or a functionally active fragment or a functionally active derivative of at least one of said proteins, or functionally active fragments or functionally active derivative thereof being selected from the first group of proteins according to No. 1 (a) and at least one of said proteins, or functionally active fragments or functionally active derivative thereof being selected from the second group of proteins according to No. 1 (b).

[2204] 14. Host cell, containing a construct of No. 13 or containing several vectors each comprising at least the nucleic acid sequence encoding at least one of the proteins, or functionally active fragments or functionally active derivatives thereof selected from the first group of proteins according to No. 1 (a) and the proteins, or functionally active fragments or functionally active derivatives thereof selected from the second group of proteins according to No. 1 (b).

[2205] 15. An antibody or a fragment of said antibody containing the binding domain thereof, selected from an antibody or fragment thereof, which binds the complex of any of No. 1-8 and which does not bind any of the proteins of said complex when uncomplexed.

16. A kit comprising in one or more container the complex of any of No. 1-8 optionally together with an antibody according to No. 15 and/or further components such as reagents and working instructions.

17. The kit according to No. 16 for processing a substrate of said complex.

18. The kit according to No. 16 for the diagnosis or prognosis of a disease or a disease risk, preferentially for a disease or disorder such as neurodegenerative disease such as Alzheimer's disease.

19. Array, in which at least a complex according to any of No. 1-8 and/or at least one antibody according to No. 15 is attached to a solid carrier.

20. A process for processing a physiological substrate of the complex comprising the step of bringing into contact a complex to any of No. 1-8 with said substrate, such that said substrate is processed.

21. A pharmaceutical composition comprising the protein complex of any of No. 1-8 and/or any of the following the proteins:

[2206] (i) “PTK7” (SEQ ID No:44) or a functionally active derivative thereof, or a functionally active fragment thereof, or a homolog thereof, or a variant of “PTK7” encoded by a nucleic acid that hybridizes to the “PTK7” nucleic acid or its complement under low stringency conditions,

[2207] (ii) “APP” (SEQ ID No:23) or a functionally active derivative thereof, or a functionally active fragment thereof, or a homolog thereof, or a variant of “APP” encoded by a nucleic acid that hybridizes to the “APP” nucleic acid or its complement under low stringency conditions,

[2208] (iii) “BRI” (SEQ ID No:5) or a functionally active derivative thereof, or a functionally active fragment thereof, or a homolog thereof, or a variant of “BRI” encoded by a nucleic acid that hybridizes to the “BRI” nucleic acid or its complement under low stringency conditions,

[2209] (iv) “CELSR2” (SEQ ID No:39) or a functionally active derivative thereof, or a functionally active fragment thereof, or a homolog thereof, or a variant of “CELSR2” encoded by a nucleic acid that hybridizes to the “CELSR2” nucleic acid or its complement under low stringency conditions,

[2210] (v) “DLK1” (SEQ ID No:7) or a functionally active derivative thereof, or a functionally active fragment thereof, or a homolog thereof, or a variant of “DLK1” encoded by a nucleic acid that hybridizes to the “DLK1” nucleic acid or its complement under low stringency conditions,

[2211] (vi) “FADS2” (SEQ ID No:40) or a functionally active derivative thereof, or a functionally active fragment thereof, or a homolog thereof, or a variant of “FADS2” encoded by a nucleic acid that hybridizes to the “FADS2” nucleic acid or its complement under low stringency conditions,

[2212] (vii) “HIFPH3/EGLN3” (SEQ ID No:64) or a functionally active derivative thereof, or a functionally active fragment thereof, or a homolog thereof, or a variant of “HIFPH3/EGLN3” encoded by a nucleic acid that hybridizes to the “HIFPH3/EGLN3” nucleic acid or its complement under low stringency conditions,

[2213] (viii) “ITM2C” (SEQ ID No:13) or a functionally active derivative thereof, or a functionally active fragment thereof, or a homolog thereof, or a variant of “ITM2C” encoded by a nucleic acid that hybridizes to the “ITM2C” nucleic acid or its complement under low stringency conditions,

[2214] (ix) “Nap1-like” (SEQ ID No:116) or a functionally active derivative thereof, or a functionally active fragment thereof, or a homolog thereof, or a variant of “Nap1-like” encoded by a nucleic acid that hybridizes to the “Nap1-like” nucleic acid or its complement under low stringency conditions,

[2215] (x) “Reelin” (SEQ ID No:51) or a functionally active derivative thereof, or a functionally active fragment thereof, or a homolog thereof, or a variant of “Reelin” encoded by a nucleic acid that hybridizes to the “Reelin” nucleic acid or its complement under low stringency conditions., and a pharmaceutical acceptable carrier.

22. A pharmaceutical composition according to No. 21 for the treatment of diseases and disorders such as neurodegenerative disease such as Alzheimer's disease.

[2216] 23. A method for screening for a molecule that modulates directly or indirectly the function, activity, composition or formation of the complex of any one of No. 1-8 comprising the steps of: (a) exposing said complex, or a cell or organism containing PTK7-complex to one or more candidate molecules; and

[2217] (b) determining the amount of activity of protein components of, and/or intracellular localization of, said complex and/or the transcription level of a gene dependent on the complex and/or the abundance and/or activity of a protein or protein complex dependent on the function of the complex and/or product of a gene dependent on the complex in the presence of the one or more candidate molecules, wherein a change in said amount, activity, protein components or intracellular localization relative to said amount, activity, protein components and/or intracellular localization and/or a change in the transcription level of a gene dependent on the complex and/or the abundance and/or activity of a protein or protein complex dependent on the function of the complex and/or product of a gene dependent on the complex in the absence of said candidate molecules indicates that the molecule modulates function, activity or composition of said complex.

24. The method of No. 23, wherein the amount of said complex is determined.

25. The method of No. 23 wherein the activity of said complex is determined.

[2218] 26. The method of No. 25 wherein said determining step comprises isolating from the cell or organism said complex to produce said isolated complex and contacting said isolated complex in the presence or absence of a candidate molecule with a substrate of said complex and determining the processing of said substrate is modified in the presence of said candidate molecule.

27. The method of No. 24 wherein the amount of the individual protein components of said complex are determined.

28. The method of No. 27 wherein said determining step comprises determining whether

[2219] (i) “PTK7” (SEQ ID No:44) or a functionally active derivative thereof, or a functionally active fragment thereof, or a homolog thereof, or a variant of “PTK7” encoded by a nucleic acid that hybridizes to the “PTK7” nucleic acid or its complement under low stringency conditions, and/or

[2220] (ii) “APP” (SEQ ID No:23) or a functionally active derivative thereof, or a functionally active fragment thereof, or a homolog thereof, or a variant of “APP” encoded by a nucleic acid that hybridizes to the “APP” nucleic acid or its complement under low stringency conditions, and/or

[2221] (iii) “BRI” (SEQ ID No:5) or a functionally active derivative thereof, or a functionally active fragment thereof, or a homolog thereof, or a variant of “BRI” encoded by a nucleic acid that hybridizes to the “BRI” nucleic acid or its complement under low stringency conditions, and/or

[2222] (iv) “CELSR2” (SEQ ID No:39) or a functionally active derivative thereof, or a functionally active fragment thereof, or a homolog thereof, or a variant of “CELSR2” encoded by a nucleic acid that hybridizes to the “CELSR2” nucleic acid or its complement under low stringency conditions, and/or

[2223] (v) “DLK1” (SEQ ID No:7) or a functionally active derivative thereof, or a functionally active fragment thereof, or a homolog thereof or a variant of “DLK1” encoded by a nucleic acid that hybridizes to the “DLK1” nucleic acid or its complement under low stringency conditions, and/or

[2224] (vi) “FADS2” (SEQ ID No:40) or a functionally active derivative thereof, or a functionally active fragment thereof, or a homolog thereof, or a variant of “FADS2” encoded by a nucleic acid that hybridizes to the “FADS2” nucleic acid or its complement under low stringency conditions, and/or

[2225] (vii) “HIFPH3/EGLN3” (SEQ ID No:64) or a functionally active derivative thereof, or a functionally active fragment thereof, or a homolog thereof, or a variant of “HIFPH3/EGLN3” encoded by a nucleic acid that hybridizes to the “HIFPH3/EGLN3” nucleic acid or its complement under low stringency conditions, and/or

[2226] (viii) “ITM2C” (SEQ ID No:13) or a functionally active derivative thereof, or a functionally active fragment thereof, or a homolog thereof, or a variant of “ITM2C” encoded by a nucleic acid that hybridizes to the “ITM2C” nucleic acid or its complement under low stringency conditions, and/or

[2227] (ix) “Nap1-like” (SEQ ID No:116) or a functionally active derivative thereof, or a functionally active fragment thereof, or a homolog thereof, or a variant of “Nap1-like” encoded by a nucleic acid that hybridizes to the “Nap1-like” nucleic acid or its complement under low stringency conditions, and/or

[2228] (x) “Reelin” (SEQ ID No:51) or a functionally active derivative thereof, or a functionally active fragment thereof, or a homolog thereof, or a variant of “Reelin” encoded by a nucleic acid that hybridizes to the “Reelin” nucleic acid or its complement under low stringency conditions, is present in the complex.

29. The method of any of No. 23-28 wherein said method is a method of screening for a drug for treatment or prevention of a disease or disorder such as neurodegenerative disease such as Alzheimer's disease.

[2229] 30. Use of a molecule that modulates the amount of, activity of, or the protein components of the complex of any one of No. 1-8 for the manufacture of a medicament for the treatment or prevention of a disease or disorder such as neurodegenerative disease such as Alzheimer's disease.

[2230] 31. A method for the production of a pharmaceutical composition comprising carrying out the method of any of No. 1-8 to identify a molecule that modulates the function, activity, composition or formation of said complex, and further comprising mixing the identified molecule with a pharmaceutically acceptable carrier.

[2231] 32. A method for diagnosing or screening for the presence of a disease or disorder or a predisposition for developing a disease or disorder in a subject, which disease or disorder is characterized by an aberrant amount of, activity of, or component composition of, or intracellular localization of the complex of any one of the No. 1-8, comprising determining the amount of, activity of, protein components of, and/or intracellular localization of, said complex and/or the transcription level of a gene dependent on the complex and/or the abundance and/or activity of a protein or protein complex dependent on the function of the complex and/or product of a gene dependent on the complex in a comparative sample derived from a subject, wherein a difference in said amount, activity, or protein components of, said complex in an analogous sample from a subject not having the disease or disorder or predisposition indicates the presence in the subject of the disease or disorder or predisposition in the subject.

33. The method of No. 32 wherein the amount of said complex is determined.

34. The method of No. 32 wherein the activity of said complex is determined.

[2232] 35. The method of No. 34 wherein said determining step comprises isolating from the subject said complex to produce said isolated complex and contacting said isolated complex in the presence or absence of a candidate molecule with a substrate of said complex and determining whether said substrate is processed in the absence of the candidate molecule and whether the processing of said substrate is modified in the presence of said candidate molecule.

36. The method of No. 32 wherein the amount of the individual protein components of said complex is determined.

37. The method of No. 36 wherein said determining step comprises determining whether

[2233] (i) “PTK7” (SEQ ID No:44) or a functionally active derivative thereof, or a functionally active fragment thereof, or a homolog thereof, or a variant of “PTK7” encoded by a nucleic acid that hybridizes to the “PTK7” nucleic acid or its complement under low stringency conditions, and/or

[2234] (ii) “APP” (SEQ ID No:23) or a functionally active derivative thereof, or a functionally active fragment thereof, or a homolog thereof, or a variant of “APP” encoded by a nucleic acid that hybridizes to the “APP” nucleic acid or its complement under low stringency conditions, and/or

[2235] (iii) “BRI” (SEQ ID No:5) or a functionally active derivative thereof, or a functionally active fragment thereof, or a homolog thereof, or a variant of “BRI” encoded by a nucleic acid that hybridizes to the “BRI” nucleic acid or its complement under low stringency conditions, and/or

[2236] (iv) “CELSR2” (SEQ ID No:39) or a functionally active derivative thereof, or a functionally active fragment thereof, or a homolog thereof, or a variant of “CELSR2” encoded by a nucleic acid that hybridizes to the “CELSR2” nucleic acid or its complement under low stringency conditions, and/or

[2237] (v) “DLK1” (SEQ ID No:7) or a functionally active derivative thereof, or a functionally active fragment thereof, or a homolog thereof, or a variant of “DLK1” encoded by a nucleic acid that hybridizes to the “DLK1” nucleic acid or its complement under low stringency conditions, and/or

[2238] (vi) “FADS2” (SEQ ID No:40) or a functionally active derivative thereof, or a functionally active fragment thereof, or a homolog thereof, or a variant of “FADS2” encoded by a nucleic acid that hybridizes to the “FADS2” nucleic acid or its complement under low stringency conditions, and/or

[2239] (vii) “HIFPH3/EGLN3” (SEQ ID No:64) or a functionally active derivative thereof, or a functionally active fragment thereof, or a homolog thereof, or a variant of “HIFPH3/EGLN3” encoded by a nucleic acid that hybridizes to the “HIFPH3/EGLN3” nucleic acid or its complement under low stringency conditions, and/or

[2240] (viii) “ITM2C” (SEQ ID No:13) or a functionally active derivative thereof, or a functionally active fragment thereof, or a homolog thereof, or a variant of “ITM2C” encoded by a nucleic acid that hybridizes to the “ITM2C” nucleic acid or its complement under low stringency conditions, and/or

[2241] (ix) “Nap1-like” (SEQ ID No:116) or a functionally active derivative thereof, or a functionally active fragment thereof, or a homolog thereof, or a variant of “Nap1-like” encoded by a nucleic acid that hybridizes to the “Nap1-like” nucleic acid or its complement under low stringency conditions, and/or

[2242] (x) “Reelin” (SEQ ID No:51) or a functionally active derivative thereof, or a functionally active fragment thereof, or a homolog thereof, or a variant of “Reelin” encoded by a nucleic acid that hybridizes to the “Reelin” nucleic acid or its complement under low stringency conditions, is present in the complex.

38. The complex of any one of No. 1-8, or the antibody or fragment of No. 15, for use in a method of diagnosing a disease or disorder such as neurodegenerative disease such as Alzheimer's disease.

[2243] 39. A method for treating or preventing a disease or disorder characterized by an aberrant amount of, activity or component composition of or intracellular localization of, the complex of anyone of No. 1-8, comprising administering to a subject in need of such treatment or prevention a therapeutically effective amount of one or more molecules that modulate the amount of, transactivation of a Gal4-driven reporter gene (e.g. by modifying the expression of one or several interacting proteins in cells by means of RNAi (siRNA) and/or plasmids encoding the interacting protein(s)), the production of Abeta-40 and Abeta-42 peptides by ELISA (e.g. by modifying the expression of one or several interacting proteins in cells by means of RNAi (siRNA) and/or plasmids encoding the interacting protein(s)), the production of C-terminal APP fragments in cell lines or transgenic animals by western blot (e.g. by modifying the expression of one or several interacting proteins in cells by means of RNAi (siRNA) and/or plasmids encoding the interacting protein(s)) or the proteolytic activity of beta- or gamma secretases towards bacterially expressed APP fragments in vitro (e.g. by modifying the expression of one or several interacting proteins in cells by means of RNAi (siRNA) and/or plasmids encoding the interacting protein(s)), or protein components of, said complex.

40. The method according to No. 39 wherein said disease or disorder involves decreased levels of the amount or activity of said complex.

41. The method according to No. 39 wherein said disease or disorder involves increased levels of the amount or activity of said complex.

42. Complex of any of No. 1-8 and/or protein selected from the following proteins

[2244] (i) “PTK7” (SEQ ID No:44) or a functionally active derivative thereof, or a functionally active fragment thereof, or a homolog thereof, or a variant of “PTK7” encoded by a nucleic acid that hybridizes to the “PTK7” nucleic acid or its complement under low stringency conditions,

[2245] (ii) “APP” (SEQ ID No:23) or a functionally active derivative thereof, or a functionally active fragment thereof, or a homolog thereof, or a variant of “APP” encoded by a nucleic acid that hybridizes to the “APP” nucleic acid or its complement under low stringency conditions,

[2246] (iii) “BRI” (SEQ ID No:5) or a functionally active derivative thereof, or a functionally active fragment thereof, or a homolog thereof, or a variant of “BRI” encoded by a nucleic acid that hybridizes to the “BRI” nucleic acid or its complement under low stringency conditions,

[2247] (iv) “CELSR2” (SEQ ID No:39) or a functionally active derivative thereof, or a functionally active fragment thereof, or a homolog thereof, or a variant of “CELSR2” encoded by a nucleic acid that hybridizes to the “CELSR2” nucleic acid or its complement under low stringency conditions,

[2248] (v) “DLK1” (SEQ ID No:7) or a functionally active derivative thereof, or a functionally active fragment thereof, or a homolog thereof, or a variant of “DLK1” encoded by a nucleic acid that hybridizes to the “DLK1” nucleic acid or its complement under low stringency conditions,

[2249] (vi) “FADS2” (SEQ ID No:40) or a functionally active derivative thereof, or a functionally active fragment thereof, or a homolog thereof, or a variant of “FADS2” encoded by a nucleic acid that hybridizes to the “PADS2” nucleic acid or its complement under low stringency conditions,

[2250] (vii) “HIFPH3/EGLN3” (SEQ ID No:64) or a functionally active derivative thereof, or a functionally active fragment thereof, or a homolog thereof, or a variant of “HIFPH3/EGLN3” encoded by a nucleic acid that hybridizes to the “HIFPH3/EGLN3” nucleic acid or its complement under low stringency conditions,

[2251] (viii) “ITM2C” (SEQ ID No:13) or a functionally active derivative thereof, or a functionally active fragment thereof, or a homolog thereof, or a variant of “ITM2C” encoded by a nucleic acid that hybridizes to the “ITM2C” nucleic acid or its complement under low stringency conditions,

[2252] (ix) “Nap1-like” (SEQ ID No:116) or a functionally active derivative thereof, or a functionally active fragment thereof, or a homolog thereof, or a variant of “Nap1-like” encoded by a nucleic acid that hybridizes to the “Nap1-like” nucleic acid or its complement under low stringency conditions,

[2253] (x) “Reelin” (SEQ ID No:51) or a functionally active derivative thereof, or a functionally active fragment thereof, or a homolog thereof, or a variant of “Reelin” encoded by a nucleic acid that hybridizes to the “Reelin” nucleic acid or its complement under low stringency conditions, as a target for an active agent of a pharmaceutical, preferably a drug target in the treatment or prevention of a disease or disorder such as neurodegenerative disease such as Alzheimer's disease.

[2254] The invention further relates to the following embodiments:
[2255] 1. A protein complex selected from complex (I) and comprising
   [2256] (a) at least one first protein, which first protein is selected from the group of proteins in table 1, fourth column of a given complex, or a functionally active derivative thereof, or a functionally active fragment thereof, or a homologue thereof, or a variant of said protein encoded by a nucleic acid that hybridizes to the nucleic acid encoding said protein under low stringency conditions; and
   [2257] (b) at least one second protein, which second protein is selected from the group of proteins in table 1, fifth column of said complex, or a functionally active derivative thereof, or a functionally active fragment thereof, or a homologue thereof, or a variant of said second protein encoded by a nucleic acid that hybridizes to the nucleic acid encoding said protein under low stringency conditions;
   [2258] and a complex (II) comprising at least two of said second proteins,
   [2259] wherein said low stringency conditions comprise hybridization in a buffer comprising 35% formamide, 5×SSC, 50 mM Tris-HCl (pH 7.5), 5 mM EDTA, 0.02% PVP, 0.02% BSA, 100 ug/ml denatured salmon sperm DNA, and 10% (wt/vol) dextran sulfate for 18-20 hours at 40° C., washing in a buffer consisting of 2×SSC, 25 mM Tris-HCl (pH 7.4), 5 mM EDTA, and 0.1% SDS for 1-5 hours at 55° C., and washing in a buffer consisting of 2×SSC, 25 mM Tris-HCl (pH 7.4) 5 mM EDTA, and 0.1% SDS for 1.5 hours at 60° C.
[2260] 2. A protein complex comprising a first protein selected from the proteins listed in table 1, second column of a given complex or a homologue or variant thereof, or a functionally active fragment or functionally active derivative of said first protein, the variant being encoded by a nucleic acid that hybridizes to the nucleic acid of said first protein under low stringency conditions, and at least one second protein selected from the group of proteins in table 1, fifth column of a given complex, or a variant or homologue thereof, or a functionally active fragment or a functionally active derivative of said second protein, the variant of said second protein being encoded by a nucleic acid that hybridizes to the nucleic acid of said second protein under low-stringency conditions, and wherein said low stringency conditions comprise hybridization in a buffer comprising 35% formamide, 5×SSC, 50 mM Tris-HCl (pH 7.5), 5 mM EDTA, 0.02% PVP, 0.02% BSA, 100 ug/ml denatured salmon sperm DNA, and 10% (wt/vol) dextran sulfate for 18-20 hours at 40° C., washing in a buffer consisting of 2×SSC, 25 mM Tris-HCl (pH 7.4), 5 mM EDTA, and 0.1% SDS for 1-5 hours at 55° C., and washing in a buffer consisting of 2×SSC, 25 mM Tris-HCl (pH 7.4) 5 mM EDTA, and 0.1% SDS for 1.5 hours at 60° C.
[2261] 3. A protein complex comprising the proteins selected from the proteins in table 1, third column or a homologue thereof, or a variant thereof or functionally active fragments or functionally active derivatives of said proteins, said variant being encoded by a nucleic acid that hybridizes to the nucleic acid of said protein under low stringency conditions; wherein said low stringency conditions comprise hybridization in a buffer comprising 35% formamide, 5×SSC, 50 mM Tris-HCl (pH 7.5), 5 mM EDTA, 0.02% PVP, 0.02% Ficoll, 0.2% BSA, 100 ug/ml denatured salmon sperm DNA, and 10% (wt/vol) dextran sulfate for 18-20 hours at 40° C., washing in a buffer consisting of 2×SSC, 25 mM Tris-HCl (pH 7.4), 5 mM EDTA, and 0.1% SDS for 1-5 hours at 55° C., and washing in a buffer consisting of 2×SSC, 25 mM Tris-HCl (pH 7.4), 5 mM EDTA, and 0.1% SDS for 1.5 hours at 60° C.
[2262] 4. A protein complex that comprises all proteins as listed in table 1, third column for a given complex or a homologue or a variant thereof, or a functionally active fragment or a functionally active derivative thereof, the variant being encoded by a nucleic acid that hybridizes to the nucleic acid of any of said proteins under low stringency conditions, but 1 to the number of proteins listed in table 1, fifth column of said complex, or a homologue or a variant thereof, or a functionally active fragment or functionally active derivative thereof, the variant being encoded by a nucleic acid that hybridizes to the nucleic acid of any of said proteins of said fifth column under low stringency conditions, wherein said low stringency conditions comprise hybridization in a buffer comprising 35% formamide, 5×SSC, 50 mM Tris-HCl (pH 7.5), 5 mM EDTA, 0.02% PVP, 0.02% Ficoll, 0.2% BSA, 100 ug/ml denatured salmon sperm DNA, and 10% (wt/vol) dextran sulfate for 18-20 hours at 40° C., washing in a buffer consisting of 2×SSC, 25 mM Tris-HCl (pH 7.4), 5 mM EDTA, and 0.1% SDS for 1-5 hours at 55° C., and washing in a buffer consisting of 2×SSC, 25 mM Tris-HCl (pH 7.4), 5 mM EDTA, and 0.1% SDS for 1.5 hours at 60° C.
[2263] 5. The complex of any of claims 1-4 comprising at least one functionally active derivative of said first protein and/or a functionally active derivative of said second protein, wherein the functionally active derivative is a fusion protein comprising said first protein or said second protein fused to an amino acid sequence different from the first protein or second protein.
[2264] 6. The complex of claim 5 wherein the functionally active derivative is a fusion protein comprising said first protein or said second protein fused to an affinity tag or label.
   7. The complex of any of claims 1-4 comprising a fragment of said first protein and/or a fragment of said second protein, which fragment binds to another protein component of said complex.
[2265] 8. The complex of any of claims 1-7 that is involved in the biochemical activity as stated in table 3.
[2266] 9. A process for preparing a complex of any of claims 1-8 and optionally the components thereof comprising the following steps:
   [2267] expressing a protein of the complex, preferably a tagged protein, in a target cell, isolating the protein complex which is attached to the protein, preferably a tagged protein, and optionally disassociating the protein complex and isolating the individual complex members.
[2268] 10. The process according to claim 9 wherein the tagged protein comprises two different tags which allow two separate affinity purification steps.
[2269] 11. The process according to any of claims 9-10 wherein the two tags are separated by a cleavage site for a protease.
[2270] 12. Component of a protein complex obtainable by a process according to any of claims 9-11.
[2271] 13. Protein selected from the group of proteins in table 1, sixth column of a given complex or a homologue or a variant of thereof, or a functionally active fragment or a functionally active derivative of said protein, the variant being encoded by a nucleic acid that hybridizes to the nucleic acid encoding said protein under low stringency conditions, wherein said low stringency conditions comprise hybridization in a buffer comprising 35% formamide, 5×SSC, 50 mM Tris-HCl (pH 7.5), 5 mM EDTA, 0.02% PVP, 0.02% Ficoll, 0.2% BSA, 100 ug/ml denatured salmon sperm DNA, and 10% (wt/vol) dextran sulfate for 18-20 hours at 40° C., washing in a buffer consisting of 2×SSC, 25 mM Tris-HCl (pH 7.4), 5 mM EDTA, and 0.1% SDS for 1.5 hours at 55° C., and washing in a buffer consisting of 2×SSC, 25 mM Tris-HCl (pH 7.4), 5 mM EDTA, and 0.1% SDS for 1.5 hours at 60° C.
[2272] 14. Nucleic acid encoding a protein according to claim 13.
[2273] 15. Construct, preferably a vector construct, comprising
   [2274] (a) a nucleic acid according to claim 14 and at least one further nucleic acid which is normally not associated with said nucleic acid, or
   [2275] (b) at least two separate nucleic acid sequences each encoding a different protein, or a functionally active fragment or a functionally active derivative thereof, or a homologue or a variant thereof, at least one of said proteins being selected from the first group of proteins according to claim 1 (a) and at least one of said proteins, being selected from the second group of proteins according to claim 1 (b).
[2276] 16. Host cell, containing a vector comprising at least one of the nucleic acid of claim 14 and/or a construct of claim 15 or containing several vectors each comprising at least the nucleic acid encoding at least one protein selected from the first group of proteins according to claim I (a) and the nucleic acid encoding at least one protein selected from the second group of proteins according to claim 1 (b).
[2277] 17. An antibody or a fragment of said antibody containing the binding domain thereof, which binds the complex of any of claims 1-8 and which does not bind any of the proteins of said complex when uncomplexed and/or an antibody of a fragment of said antibody containing the binding domain thereof which binds to any of the group of proteins according to claim 13.
[2278] 18. A kit comprising in one or more containers the complex of any of claims 1-8 and/or the proteins of claim 13, optionally together with an antibody according to claim 17 and/or further components such as reagents and working instructions.
[2279] 19. The kit according to claim 18 for processing a substrate of a complex of any one of claims 1-8.
[2280] 20. The kit according to claim 18 for the diagnosis or prognosis of a disease or a disease risk, preferentially for a disease or disorder such as neurodegenerative disease such as Alzheimer's disease and related neurodegenerative disorders.
[2281] 21. Array in which at least a complex according to any of claims 1-8 and/or at least one protein according to claim 13 and/or at least one antibody according to claim 17 is attached to a solid carrier.
[2282] 22. A process for processing a substrate of a complex of any one of claims 1-8 comprising the step of bringing into contact a complex to any of claims 1-8 with said substrate, such that said substrate is processed.
[2283] 23. A pharmaceutical composition comprising the protein complex of any of claims 1-8 and/or any of the proteins according to claim 13.
[2284] 24. A pharmaceutical composition according to claim 23 for the treatment of diseases and disorders, preferentially for diseases or disorders such as neurodegenerative disease such as Alzheimer's disease and related neurodegenerative disorders.
[2285] 25. A method for screening for a molecule that binds to the complex of any one of claims 1-8 and/or any of the proteins of claim 13, comprising the following steps:
   [2286] (a) exposing said complex or protein, or a cell or organism containing said complex or said protein, to one or more candidate molecules; and
   [2287] (b) determining whether said candidate molecule is bound to the complex or protein.
[2288] 26. A method for screening for a molecule that modulates directly or indirectly the function, activity, composition or formation of the complex of any one of claims 1-8 comprising the steps of:
   [2289] (a) exposing said complex, or a cell or organism containing said complex to one or more candidate molecules; and
   [2290] (b) determining the amount of, activity of, protein components of, and/or intracellular localization of, said complex and/or the transcription level of a gene dependent on the complex and/or the abundance and/or activity of a protein or protein complex dependent upon the function of the complex and/or product of a gene dependent on the complex in the presence of the one or more candidate molecules, wherein a change in said amount, activity, protein components or intracellular localization relative to said amount, activity, protein components and/or intracellular localization and/or a change in the transcription level of a gene dependent on the complex and/or the abundance and/or activity of a protein or protein complex dependent on the function of the complex and/or product of a gene dependent on the complex in the absence of said candidate molecules indicates that the molecule modulates function, activity, or composition of said complex.
[2291] 27. The method of claim 26, wherein the amount of said complex is determined.
[2292] 28. The method of claim 26, wherein the activity of said complex is determined.
[2293] 29. The method of claim 28, wherein said determining step comprises isolating from the cell or organism said complex to produce said isolated complex and contacting said isolated complex in the presence or absence of a candidate molecule with a substrate of said complex and determining whether said substrate is processed in the absence of the candidate molecule and whether the processing of said substrate is modified in the presence of said candidate molecule.
[2294] 30. The method of claim 26, wherein the amount of the individual protein components of said complex are determined.
[2295] 31. The method of claim 30, wherein said determining step comprises determining whether any of the proteins listed in table 1, third column of said complex, or a functionally active fragment or a functionally active derivative thereof, or a variant or a homologue thereof, the variant being encoded by a nucleic acid that hybridizes to the nucleic acid of said protein under low-stringency conditions, is present in the complex.
[2296] 32. The method of any of claims 26-31, wherein said method is a method of screening for a drug for treatment or prevention of a disease or disorder, preferentially of a disease or disorder selected from the diseases or disorders such as neurodegenerative disease such as Alzheimer's disease and related neurodegenerative disorders.
[2297] 33. Use of a molecule that modulates the amount of, activity of, or the protein components of the complex of any one of claims 1-8 for the manufacture of a medicament for the treatment or prevention of a disease or disorder, preferentially of a disease or disorder such as neurodegenerative disease such as Alzheimer's disease and related neurodegenerative disorders.
[2298] 34. A method for the production of a pharmaceutical composition comprising carrying out the method of claims 26-31 to identify a molecule that modulates the function, activity, composition or formation of said complex, and further comprising mixing the identified molecule with a pharmaceutically acceptable carrier.
[2299] 35. A method for diagnosing or screening for the presence of a disease or disorder or a predisposition for developing a disease or disorder in a subject, which disease or disorder is characterized by an aberrant amount of, component disposition of, or intracellular localization of the complex of any one of the claims 1-8, comprising determining the amount of, activity of, protein components of, and/or intracellular localization of, said complex and/or the transcription level of a gene dependent on the complex and/or the abundance and/or activity of a protein or protein complex dependent on the function of the complex and/or product of a gene dependent on the complex in a comparative sample derived from a subject, wherein a difference in said amount, activity, or protein components of, said complex in an analogous sample from a subject not having the disease or disorder or predisposition indicated the presence in the subject of the disease or disorder or predisposition in the subject.
[2300] 36. The method of claim 35, wherein the amount of said complex is determined.
[2301] 37. The method of claim 35, wherein the activity of said complex is determined.
[2302] 38. The method of claim 37, wherein said determining step comprises isolating from the cell or organism said complex to produce said isolated complex and contacting said isolated complex in the presence or absence of a candidate molecule with a substrate of said complex and determining whether said substrate is processed in the absence of the candidate molecule and whether the processing of said substrate is modified in the presence of said candidate molecule.
[2303] 39. The method of claim 35, wherein the amount of the individual protein components of said complex are determined.
[2304] 40. The method of claim 39, wherein said determining step comprises determining whether any of the proteins according to claim 13 is present in the complex.
[2305] 41. The complex of any one of claims 1-8, or proteins of claim 13 or the antibody of fragment of claim 17, for use in a method of diagnosing a disease or disorder, preferentially of a disease or disorder such as neurodegenerative disease such as Alzheimer's disease and related neurodegenerative disorders.
[2306] 42. A method for treating or preventing a disease or disorder characterized by an aberrant amount of, activity of, component composition of or intracellular localization of, the complex of any one of claims 1-8, comprising administering to a subject in need of such treatment or prevention a therapeutically effective amount of one or more molecules that modulate the amount of, activity or, or protein components of, said complex.
[2307] 43. The method according to claim 42, wherein said disease or disorder involves decreased levels of the amount or activity of said complex.
[2308] 44. The method according to claim 42, wherein said disease or disorder involves increased levels of the amount or activity of said complex.
[2309] 45. Complex of claims 1-8 and/or any of the proteins listed in table 1, fifth column of said complex as a target for an active agent of a pharmaceutical, preferably a drug target in the treatment or prevention of a disease or disorder, preferentially of a disease or disorder such as neurodegenerative disease such as Alzheimer's disease and related neurodegenerative disorders.

[2310] And to the further embodiments:
[2311] 1. A protein complex selected from the group consisting of
   [2312] A) complex (I), wherein complex (I) comprises
   [2313] (a) at least one first protein, which first protein is selected from the group of proteins in table 1, fourth column of a given complex, or a functionally active derivative thereof, or a functionally active fragment thereof, or a homologue thereof, or a variant of said protein encoded by a nucleic acid that hybridizes to the nucleic acid encoding said protein under low stringency conditions; and
   [2314] (b) at least one second protein, which second protein is selected from the group of proteins in table 1, fifth column of the same complex as addressed in (a), or a functionally active derivative thereof, or a functionally active fragment thereof, or a homologue thereof, or a variant of said second protein encoded by a nucleic acid that hybridizes to the nucleic acid encoding said protein under low stringency conditions;
   [2315] and
   [2316] B) complex (II), which comprises at least two of said second proteins, wherein said low stringency conditions preferably comprise hybridization in a buffer comprising 35% formamide, 5×SSC, 50 mM Tris-HCl (pH 7.5), 5 mM EDTA, 0.02% PVP, 0.02% BSA, 100 ug/ml denatured salmon sperm DNA, and 10% (wt/vol) dextran sulfate for 18-20 hours at 40° C., washing in a buffer consisting of 2×SSC, 25 mM Tris-HCl (pH 7.4), 5 mM EDTA, and 0.1% SDS for 1-5 hours at 55° C., and washing in a buffer consisting of 2×SSC, 25 mM Tris-HCl (pH 7.4) 5 mM EDTA, and 0.1% SDS for 1.5 hours at 60° C.
[2317] 2. A protein complex comprising a first protein selected from the proteins listed in table 1, second column of a given complex or a homologue or variant thereof, or a functionally active fragment or functionally active derivative of said first protein, the variant being encoded by a nucleic acid that hybridizes to the nucleic acid of said first protein under low stringency conditions, and at least one second protein selected from the group of proteins in table 1, fifth column of the same complex, or a variant or homologue thereof, or a functionally active fragment or a functionally active derivative of said second protein, the variant of said second protein being encoded by a nucleic acid that hybridizes to the nucleic acid of said second protein under low-stringency conditions, and wherein said low stringency conditions preferably comprise hybridization in a buffer comprising 35% formamide, 5×SSC, 50 mM Tris-HCl (pH 7.5), 5 mM EDTA, 0.02% PVP, 0.02% BSA, 100 ug/ml denatured salmon sperm DNA, and 10% (wt/vol) dextran sulfate for 18-20 hours at 40° C., washing in a buffer consisting of 2×SSC, 25 mM Tris-HCl (pH 7.4), 5 mM EDTA, and 0.1% SDS for 1-5 hours at 55° C., and washing in a buffer consisting of 2×SSC, 25 mM Tris-HCl (pH 7.4) 5 mM EDTA, and 0.1% SDS for 1.5 hours at 60° C.
[2318] 3. A protein complex comprising the proteins selected from the proteins in table 1, third column or a homologue thereof, or a variant thereof or functionally active fragments or functionally active derivatives of said proteins, said variant being encoded by a nucleic acid that hybridizes to the nucleic acid of said protein under low stringency conditions; wherein said low stringency conditions preferably comprise hybridization in a buffer comprising 35% formamide, 5×SSC, 50 mM Tris-HCl (pH 7.5), 5 mM EDTA, 0.02% PVP, 0.02% Ficoll, 0.2% BSA, 100 ug/ml denatured salmon sperm DNA, and 10% (wt/vol) dextran sulfate for 18-20 hours at 40° C., washing in a buffer consisting of 2×SSC, 25 mM Tris-HCl (pH 7.4), 5 mM EDTA, and 0.1% SDS for 1-5 hours at 55° C., and washing in a buffer consisting of 2×SSC, 25 mM Tris-HCl (pH 7.4), 5 mM EDTA, and 0.1% SDS for 1.5 hours at 60° C.
[2319] 4. A protein complex that comprises all proteins as listed in table 1, third column for a given complex or a homologue or a variant thereof, or a functionally active fragment or a functionally active derivative thereof, the variant being encoded by a nucleic acid that hybridizes to the nucleic acid of any of said proteins under low stringency conditions, but 1 to the number of proteins listed in table 1, fifth column of said complex, or a homologue or a variant thereof, or a functionally active fragment or functionally active derivative thereof, the variant being encoded by a nucleic acid that hybridizes to the nucleic acid of any of said proteins of said fifth column under low stringency conditions, wherein said low stringency conditions preferably comprise hybridization in a buffer comprising 35% formamide, 5×SSC, 50 mM Tris-HCl (pH 7.5), 5 mM EDTA, 0.02% PVP, 0.02% Ficoll, 0.2% BSA, 100 ug/ml denatured salmon sperm DNA, and 10% (wt/vol) dextran sulfate for 18-20 hours at 40° C., washing in a buffer consisting of 2×SSC, 25 mM Tris-HCl (pH 7.4), 5 mM EDTA, and 0.1% SDS for 1-5 hours at 55° C., and washing in a buffer consisting of 2×SSC, 25 mM Tris-HCl (pH 7.4), 5 mM EDTA, and 0.1% SDS for 1.5 hours at 60° C.
[2320] 5. The complex of any of claims 1-4 comprising at least one functionally active derivative of said first protein and/or a functionally active derivative of said second protein, wherein the functionally active derivative is a fusion protein comprising said first protein or said second protein fused to an amino acid sequence different from the first protein or second protein.
[2321] 6. The complex of claim 5 wherein the functionally active derivative is a fusion protein comprising said first protein or said second protein fused to an affinity tag or label.
[2322] 7. The complex of any of claims 1-4 comprising a fragment of said first protein and/or a fragment of said second protein, which fragment binds to another protein component of said complex.
[2323] 8. The complex of any of claims 1-7 that is involved in the biochemical activity as stated in table 3.
[2324] 9. A process for preparing a complex of any of claims 1-8 and optionally the components thereof comprising the following steps: expressing a protein of the complex, preferably a tagged protein, in a target cell, isolating the protein complex which is attached to the protein, preferably a tagged protein, and optionally disassociating the protein complex and isolating the individual complex members.
[2325] 10. The process according to claim 9 wherein the tagged protein comprises two different tags which allow two separate affinity purification steps.
[2326] 11. The process according to any of claims 9-10 wherein the two tags are separated by a cleavage site for a protease.
[2327] 12. Component of a protein complex obtainable by a process according to any of claims 9-11.
[2328] 13. Protein selected from the group of proteins in table 1, sixth column of a given complex or a homologue or a variant of thereof, or a functionally active fragment or a functionally active derivative of said protein, the variant being encoded by a nucleic acid that hybridizes to the nucleic acid encoding said protein under low stringency conditions, wherein said low stringency conditions preferably comprise hybridization in a buffer comprising 35% formamide, 5×SSC, 50 mM Tris-HCl (pH 7.5), 5 mM EDTA, 0.02% PVP, 0.02% Ficoll, 0.2% BSA, 100 ug/ml denatured salmon sperm DNA, and 10% (wt/vol) dextran sulfate for 18-20 hours at 40° C., washing in a buffer consisting of 2×SSC, 25 mM Tris-HCl (pH 7.4), 5 mM EDTA, and 0.1% SDS for 1.5 hours at 55° C., and washing in a buffer consisting of 2×SSC, 25 mM Tris-HCl (pH 7.4), 5 mM EDTA, and 0.1% SDS for 1.5 hours at 60° C.
[2329] 14. Nucleic acid encoding a protein according to claim 13.
[2330] 15. Construct, preferably a vector construct, comprising
   [2331] (a) a nucleic acid according to claim 14 and at least one further nucleic acid which is normally not associated with said nucleic acid, or
   [2332] (b) at least two separate nucleic acid sequences each encoding a different protein, or a functionally active fragment or a functionally active derivative thereof, or a homologue or a variant thereof, at least one of said proteins being selected from the first group of proteins according to claim 1 (a) and at least one of said proteins, being selected from the second group of proteins according to claim 1 (b).
[2333] 16. Host cell, containing a vector comprising at least one of the nucleic acid of claim 14 and/or a construct of claim 15 or containing several vectors each comprising at least the nucleic acid encoding at least one protein selected from the first group of proteins according to claim 1 (a) and the nucleic acid encoding at least one protein selected from the second group of proteins according to claim 1 (b).
[2334] 17. An antibody or a fragment of said antibody containing the binding domain thereof, which binds the complex of any of claims 1-8 and which does not bind any of the proteins of said complex when uncomplexed and/or an antibody of a fragment of said antibody containing the binding domain thereof which binds to any of the group of proteins according to claim 13.
[2335] 18. A kit comprising in one or more containers the complex of any of claims 1-8 and/or the proteins of claim 13, optionally together with an antibody according to claim 17 and/or further components such as reagents and working instructions.
[2336] 19. The kit according to claim 18 for processing a substrate of a complex of any one of claims 1-8.
[2337] 20. The kit according to claim 18 for the diagnosis or prognosis of a disease or a disease risk, preferentially for a disease or disorder such as neurodegenerative disease such as Alzheimer's disease and related neurodegenerative disorders.
[2338] 21. Array in which at least a complex according to any of claims 1-8 and/or at least one protein according to claim 13 and/or at least one antibody according to claim 17 is attached to a solid carrier.
[2339] 22. A process for processing a substrate of a complex of any one of claims 1-8 comprising the step of bringing into contact a complex to any of claims 1-8 with said substrate, such that said substrate is processed.
[2340] 23. A pharmaceutical composition comprising the protein complex of any of claims 1-8 and/or any of the proteins according to claim 13.
[2341] 24. A pharmaceutical composition according to claim 23 for the treatment of diseases and disorders, preferentially for diseases or disorders such as neurodegenerative disease such as Alzheimer's disease and related neurodegenerative disorders.
[2342] 25. A method for screening for a molecule that binds to the complex of any one of claims 1-8 and/or any of the proteins of claim 13, comprising the following steps:
   [2343] (a) exposing said complex or protein, or a cell or organism containing said complex or said protein, to one or more candidate molecules; and
   [2344] (b) determining whether said candidate molecule is bound to the complex or protein.
[2345] 26. A method for screening for a molecule that modulates directly or indirectly the function, activity, composition or formation of the complex of any one of claims 1-8 comprising the steps of:
   [2346] (a) exposing said complex, or a cell or organism containing said complex to one or more candidate molecules; and
   [2347] (b) determining the amount of, activity of, protein components of, and/or intracellular localization of, said complex and/or the transcription level of a gene dependent on the complex and/or the abundance and/or activity of a protein or protein complex dependent upon the function of the complex and/or product of a gene dependent on the complex in the presence of the one or more candidate molecules, wherein a change in said amount, activity, protein components or intracellular localization relative to said amount, activity, protein components and/or intracellular localization and/or a change in the transcription level of a gene dependent on the complex and/or the abundance and/or activity of a protein or protein complex dependent on the function of the complex and/or product of a gene dependent on the complex in the absence of said candidate molecules indicates that the molecule modulates function, activity, or composition of said complex.
[2348] 27. The method of claim 26, wherein the amount of said complex is determined.
[2349] 28. The method of claim 26, wherein the activity of said complex is determined.
[2350] 29. The method of claim 28, wherein said determining step comprises isolating from the cell or organism said complex to produce said isolated complex and contacting said isolated complex in the presence or absence of a candidate molecule with a substrate of said complex and determining whether said substrate is processed in the absence of the candidate molecule and whether the processing of said substrate is modified in the presence of said candidate molecule.
[2351] 30. The method of claim 26, wherein the amount of the individual protein components of said complex are determined.
[2352] 31. The method of claim 30, wherein said determining step comprises determining whether any of the proteins listed in table 1, third column of said complex, or a functionally active fragment or a functionally active derivative thereof, or a variant or a homologue thereof, the variant being encoded by a nucleic acid that hybridizes to the nucleic acid of said protein under low-stringency conditions, is present in the complex.
[2353] 32. The method of any of claims 26-31, wherein said method is a method of screening for a drug for treatment or prevention of a disease or disorder, preferentially of a disease or disorder selected from the diseases or disorders such as neurodegenerative disease such as Alzheimer's disease and related neurodegenerative disorders.
[2354] 33. Use of a molecule that modulates the amount of, activity of, or the protein components of the complex of any one of claims 1-8 for the manufacture of a medicament for the treatment or prevention of a disease or disorder, preferentially of a disease or disorder such as neurodegenerative disease such as Alzheimer's disease and related neurodegenerative disorders.
[2355] 34. A method for the production of a pharmaceutical composition comprising carrying out the method of claims 26-31 to identify a molecule that modulates the function, activity, composition or formation of said complex, and further comprising mixing the identified molecule with a pharmaceutically acceptable carrier.
[2356] 35. A method for diagnosing or screening for the presence of a disease or disorder or a predisposition for developing a disease or disorder in a subject, which disease or disorder is characterized by an aberrant amount of, component disposition of, or intracellular localization of the complex of any one of the claims 1-8, comprising determining the amount of, activity of, protein components of, and/or intracellular localization of, said complex and/or the transcription level of a gene dependent on the complex and/or the abundance and/or activity of a protein or protein complex dependent on the function of the complex and/or product of a gene dependent on the complex in a comparative sample derived from a subject, wherein a difference in said amount, activity, or protein components of, said complex in an analogous sample from a subject not having the disease or disorder or predisposition indicated the presence in the subject of the disease or disorder or predisposition in the subject.
[2357] 36. The method of claim 35, wherein the amount of said complex is determined.
[2358] 37. The method of claim 35, wherein the activity of said complex is determined.
[2359] 38. The method of claim 37, wherein said determining step comprises isolating from the cell or organism said complex to produce said isolated complex and contacting said isolated complex in the presence or absence of a candidate molecule with a substrate of said complex and determining whether said substrate is processed in the absence of the candidate molecule and whether the processing of said substrate is modified in the presence of said candidate molecule.
[2360] 39. The method of claim 35, wherein the amount of the individual protein components of said complex are determined.
[2361] 40. The method of claim 39, wherein said determining step comprises determining whether any of the proteins according to claim 13 is present in the complex.
[2362] 41. The complex of any one of claims 1-8, or proteins of claim 13 or the antibody of fragment of claim 17, for use in a method of diagnosing a disease or disorder, preferentially of a disease or disorder such as neurodegenerative disease such as Alzheimer's disease and related neurodegenerative disorders.
[2363] 42. A method for treating or preventing a disease or disorder characterized by an aberrant amount of, activity of, component composition of or intracellular localization of, the complex of any one of claims 1-8, comprising administering to a subject in need of such treatment or prevention a therapeutically effective amount of one or more molecules that modulate the amount of, activity or, or protein components of, said complex.
[2364] 43. The method according to claim 42, wherein said disease or disorder involves decreased levels of the amount or activity of said complex.
[2365] 44. The method according to claim 42, wherein said disease or disorder involves increased levels of the amount or activity of said complex.
[2366] 45. Complex of claims 1-8 and/or any of the proteins listed in table 1, fifth column of said complex as a target for an active agent of a pharmaceutical, preferably a drug target in the treatment or prevention of a disease or disorder, preferentially of a disease or disorder such as neurodegenerative disease such as Alzheimer's disease and related neurodegenerative disorders.
   Tables and Figures
   Tables:
   Table 1: Composition of Complexes
   First column (‘Name of complex’): Lists the name of the protein complexes as used herein.
   Second column (‘Entry point’): Lists the bait proteins that have been chosen for the purification of the given complex.
   Third column (‘All interactors’): Lists all novel interactors which have been identified as members of the complex and all interactors which have been known to be associated with the bait so far.
   Fourth column (‘Known interactors’): Lists all interactors which have been known to be associated with the bait so far.
   Fifth column (‘Novel interactors of the complex’): Lists all novel interactors of the complex which have been identified in the experiments provided herein.
   Sixth column: Separately lists the members of the newly identified complex which have not been annotated previously.
   Table 2: Individual Proteins of the Complexes
   First column (‘Protein’): Lists in alphabetical order all proteins which have been identified as interactors of the complexes presented herein.
   Second column (‘SEQ ID’): Lists the SEQ ID (Sequence Identifications) of the proteins herein as used herein.
   Third column (‘IPI-Numbers’): Lists the IPI-Numbers of the proteins herein. The IPI-Numbers refer to the International Protein Index created by the European Bioinformatics Institute (EMBL-EBI), Hinxton, UK.
   Fourth column (‘Molecular Weight’): Lists the Molecular Weight of the proteins in Dalton.
   Table 3: Biochemical Activities of the Complexes of the Invention.
   First column (‘Name of complex’): Lists the name of the protein complexes as used herein.
   Second column (‘Biochemical Activity’): Lists biochemical activities of the complexes.
   Assays in order to test these activities are also provided herein (infra).

### FIGURES

[2367] FIG. 1: Schematic representation of PADS2-containing protein complexes. FADS2 is a component of BACE1-, Nicastrin- and PTK7-protein complexes.

[2368] TAP-tagged BACE1, Nicastrin and PTK7 were retrovirally transduced into SKNBE2 neuroblastoma cells and the respective protein complexes were subsequently obtained by tandem-affinity purification. Associated proteins were identified by liquid chromatography-MS/MS.

[2369] FIG. 2:

[2370] FADS2 is highly expressed in human brain.

[2371] FADS2-specific primers and equal amounts of total RNA from various human tissue sources were utilized for determination of relative expression levels of FADS2 by quantitative PCR. Three independent experiments were performed and all values were normalized to a human reference RNA (Universal Human Reference RNA, Stratagene, No. 740000).

[2372] FIG. 3 A+B:

[2373] siRNA-mediated knock-down of FADS2 expression attenuates secretion of Aβ1-42 from two different cell lines.

[2374] (upper panels) siRNAs directed against BACE1, FADS2 (A and B) or Luc3 were transfected into SKNBE2 neuroblastoma cells (FIG. 3 A) or H4 neuroglioma cells (FIG. 3 B) over-expressing mutant APPsw. 48 h after transfection growth medium was removed and cells were incubated over night in serum-free medium. Supernatants were collected and levels of Aβ1-42 determined by ELISA (Innogenetics). At least three independent experiments were performed in duplicate.

[2375] (lower panels) siRNAs directed against FADS2 (A and B) or Luc3 were co-transfected with CTAP-FADS2 into SKNBE2 neuroblastoma cells (FIG. 3 A) or H4 neuroglioma cells (FIG. 3 B). 48 h after transfection cells were lysed. 30 μg of the lysates were separated by SDS-PAGE, transferred to nitrocellulose and probed with antibodies directed either against the TAP-tag or against tubulin.

[2376] FIG. 4:

[2377] SCD4 is very highly expressed in human brain.

[2378] 5 μg of total RNA from various human tissue sources (Clontech) was reverse transcribed. Equal amounts of that cDNA and SCD4-specific primers were utilized for determination of relative expression levels of SCD4 by quantitative PCR. Three independent experiments were performed and all values were normalized to a human reference RNA (Stratagene).

[2379] FIG. 5:

[2380] siRNA-mediated knock-down of SCD4 expression attenuates secretion of Aβ1-42.

[2381] (left panel) siRNAs directed against BACE1, SCD4 or Luc3 were transfected into H4 neuroglioma cells over-expressing mutant APPsw. 48 h after transfection growth medium was removed and cells were incubated over night in serum-free medium. Supernatants were collected and levels of A□1-42 determined by ELISA (Innogenetics). At least three independent experiments were performed in duplicate.

[2382] (right panel) siRNA directed against SCD4 specifically reduces mRNA levels. Total RNA was prepared from H4/APPsw cells transfected with siRNA directed against either Luc3 or SCD4. After reverse transcription, relative amounts of SCD4 transcripts were determined by quantitative PCR. At least two independent experiments were performed.

[2383] FIG. 6:

[2384] DEGS is highly expressed in human brain.

[2385] 5 μg of total RNA from various human tissue sources (Clontech) was reverse transcribed. Equal amounts of that cDNA and DEGS-specific primers were utilized for determination of relative expression levels of DEGS by quantitative PCR. Three independent experiments were performed and all values were normalized to a human reference RNA (Stratagene).

[2386] FIG. 7:

[2387] siRNA-mediated knock-down of DEGS expression attenuates secretion of Aβ1-42.

[2388] (left panel) siRNAs directed against BACE1, DEGS or Luc3 were transfected into H4 neuroglioma cells over-expressing mutant APPsw. 48 h after transfection growth medium was removed and cells were incubated over night in serum-free medium. Supernatants were collected and levels of Aβ1-42 determined by ELISA (Innogenetics). At least three independent experiments were performed in duplicate.

[2389] (right panel) siRNA directed against DEGS specifically reduces mRNA levels. Total RNA was prepared from H4/APPsw cells transfected with siRNA directed against either Luc3 or DEGS. After reverse transcription, relative amounts of DEGS transcripts were determined by quantitative PCR. At least two independent experiments were performed.

### EXAMPLES

[2390] The following examples refer to all embodiments of the invention and especially to the embodiments as claimed in the claims.

[2391] The TAP-technology, which is more fully described in EP 1 105 508 B1 and in Rigaut, et al., 1999, Nature Biotechnol. 17:1030-1032 respectively was used and further adapted as described below for protein purification. Proteins were identified using mass spectrometry as described further below.

### Example 1

### Construction of TAP-Tagged Bait

[2392] The cDNAs encoding the complete ORF were obtained by RT-PCR. Total RNA was prepared from appropriate cell lines using the RNeasy Mini Kit (Qiagen). Both cDNA synthesis and PCR were performed with the SUPERSCRIPT One-Step RT-PCR for Long templates Kit (Life Technologies) using gene-specific primers. After 35-40 cycles of amplification PCR-products with the expected size were gel-purified with the MinElute PCR Purification Kit (Qiagen) and, if necessary, used for further amplification. Low-abundant RNAs were amplified by nested PCR before gel-purification. Restriction sites for NotI were attached to PCR primers to allow subcloning of amplified cDNAs into the retroviral vectors pIE94-N/C-TAP thereby generating N- or C-terminal fusions with the TAP-tag (Rigaut et al., 1999, Nature Biotechnol. 17:1030-1032). N-terminal tagging was chosen for the following baits/entry points: Presenilin 1, Presenilin 2, Aph-1a, Aph-1b, Pen-2, APP, Tau, Fe65, Calsenilin. C-terminal tagging was chosen for the following baits/entry points: Nicastrin, Aph-1a, Aph-1b, BACE1 D215N, APP, APP695SW, APP-C99, Fe65, X11beta.

[2393] Clones were analyzed by restriction digest, DNA sequencing and by in vitro translation using the TNT T7 Quick Coupled Transcription/Translation System (Promega inc.). The presence of the proteins was proven by Western blotting using the protein A part of the TAP-tag for detection. Briefly, separation of proteins by standard SDS-PAGE was followed by semi-dry transfer onto a nitrocellulose membrane (PROTRAN, Schleicher&Schuell) using the MultiphorII blotting apparatus from Pharmacia Biotech. The transfer buffer consisted of 48 mM Tris, 39 mM glycine, 10% methanol and 0.0375% sodium dodecylsulfate. After blocking in phosphate-buffered saline (PBS) supplemented with 10% dry milk powder and 0.1% Tween 20 transferred proteins were probed with the Peroxidase-Anti-Peroxidase Soluble Complex (Sigma) diluted in blocking solution. After intensive washing immunoreactive proteins were visualized by enhanced chemiluminescence (ECL; Amersham Pharmacia Biotech).

### Example 2

### Preparation of Virus and Infection

[2394] As a vector, a MoMLV-based recombinant virus was used.

[2395] The preparation has been carried out as follows:

1. Preparation of Virus

[2396] 293 gp cells were grown to 100% confluency. They were split 1:5 on poly-L-Lysine plates (1:5 diluted poly-L-Lysine [0.01% stock solution, Sigma P-4832] in PBS, left on plates for at least 10 min.). On Day 2, 63 microgram of retroviral Vector DNA together with 13 microgram of DNA of plasmid encoding an appropriate envelope protein were transfected into 293 gp cells (Somia, et al., 1999, Proc. Natl. Acad. Sci. USA 96:12667-12672; Somia, et al. 2000, J. Virol. 74:4420-4424). On Day 3, the medium was replaced with 15 ml DMEM+10% FBS per 15-cm dish. On Day 4, the medium containing viruses (supernatant) was harvested (at 24 h following medium change after transfection). When a second collection was planned, DMEM 10% FBS was added to the plates and the plates were incubated for another 24 h. All collections were done as follows: The supernatant was filtered through 0.45 micrometer filter (Corning GmbH, cellulose acetate, 431155). The filter was placed into konical polyallomer centrifuge tubes (Beckman, 358126) that are placed in buckets of a SW 28 rotor (Beckman). The filtered supernatant was ultracentrifuged at 19400 rpm in the SW 28 rotor, for 2 hours at 21 degree Celsius. The supernatant was discarded. The pellet containing viruses was resuspended in a small volume (for example 300 microliter) of Hank's Balanced Salt Solution [Gibco BRL, 14025-092], by pipetting up and down 100-times, using an aerosol-safe tip. The viruses were used for transfection as described below.

2. Infection

[2397] Cells that were infected were plated one day before into one well of a 6-well plate. 4 hours before infection, the old medium on the cells was replaced with fresh medium. Only a minimal volume was added, so that the cells are completely covered (e.g. 700 microliter). During infection, the cells were actively dividing.

[2398] A description of the cells and their growth conditions is given further below (“3. Cell lines”)

[2399] To the concentrated virus, polybrene (Hexadimethrine Bromide; Sigma, H 9268) was added to achieve a final concentration of 8 microgram/ml (this is equivalent to 2.4 microliter of the 1 milligram/ml polybrene stock per 300 microliter of concentrated retrovirus). The virus was incubated in polybrene at room temperature for 1 hour. For infection, the virus/polybrene mixture was added to the cells and incubated at 37 degree Celsius at the appropriate CO₂ concentration for several hours (e.g. over-day or over-night). Following infection, the medium on the infected cells was replaced with fresh medium. The cells were passaged as usual after they became confluent. The cells contain the retrovirus integrated into their chromosomes and stably express the gene of interest.

3. Cell Lines

[2400] For expression, SKN-BE2 cells were used. SKN-BE2 cells (American Type Culture Collection-No. CRL-2271) were grown in 95% OptiMEM+5% iron-supplemented calf serum.

[2401] The expression pattern of the TAP-tagged proteins was checked by immunoblot-analysis as described in Example 3, Nr. 3 and/or by immunofluorescence as described in Example 3, Nr. 1 or 2.

### Example 3

### Checking of Expression Pattern of TAP-Tagged Proteins

[2402] The expression pattern of the TAP-tagged protein was checked by immunoblot analysis and/or by immunofluorescence. Immunofluorescence analysis was either carried out according to No. 1 or to No. .2 depending on the type of the TAP-tagged protein. Immunoblot analysis was carried out according to No. 3.

1 Protocol for the Indirect Immunofluorescence Staining of Fixed Mammalian Cells for Plasma Membrane and ER Bound Proteins

[2403] Cells were grown in FCS media on polylysine coated 8 well chamber slides to 50% confluency. Then fixation of the cells was performed in 4% ParaFormAldehyde diluted in Phosphate Buffer Saline (PBS) solution (0.14M Phosphate, 0.1M NaCl pH 7.4). The cells were incubated for 30 minutes at room temperature in 300 microliters per well. Quenching was performed in 0.1M Glycine in PBS for 2×20 minutes at room temperature. Blocking was performed with 1% Bovine Serum Albumin (BSA) in 0.3% Saponin+PBS for at least 1 hour at room temperature. Incubation of the primary antibodies was performed in the blocking solution overnight at +4° C. The proper dilution of the antibodies was determined in a case to case basis. Cells were washed in PBS containing 0.3% Saponin for 2×20 minutes at room temperature. Incubation of the secondary antibodies is performed in the blocking solution. Alexa 594 coupled goat anti-rabbit is diluted 1:1000 (Molecular Probes). Alexa 488 coupled goat anti-mouse is diluted 1:1000 (Molecular Probes). DAPI was used to label DNA. If Phalloidin was used to label F-actin, the drug is diluted 1:500 and incubated with the secondary antibodies. Cells were then washed again 2×20 minutes at room temperature in PBS. The excess of buffer was removed and cells were mounted in a media containing an anti-bleaching agent (Vectashield, Vector Laboratories).

2 Protocol for the Indirect Immunofluorescence Staining of Fixed Mammalian Cells for Non-Plasma Membrane Bound Proteins:

[2404] Cells were grown in FCS media on Polylysine coated 8 well chamber slides to 50% confluency. Fixation of the cells was performed in 4% ParaFormAldehyde diluted in Phosphate Buffer Saline (PBS) solution (0.14M Phosphate, 0.1M NaCl pH 7.4) for 30 minutes at Room Temperature (RT), 300 microliters per well. Quenching was performed in 0.1M Glycine in PBS for 2×20 minutes at roon temperature. Permeabilization of cells was done with 0.5% Triton X-100 in PBS for 10 minutes at room temperature. Blocking was then done in 1% Bovine Serum Albumin (BSA) in 0.3% Saponin+PBS for at least 1 hour at RT (Blocking solution). Incubation of the primary antibodies was performed in the blocking solution, overnight at +4° C. The proper dilution of the antibodies has to be determined in a case to case basis. Cells were washed in PBS containing 0.3% Saponin, for 2×20 minutes at RT. Incubation of the secondary antibodies was performed in the blocking solution. Alexa 594 coupled goat anti-rabbit is diluted 1:1000 (Molecular Probes), Alexa 488 coupled goat anti-mouse is diluted 1:1000 (Molecular Probes). DAPI was used to label DNA. If Phalloidin is used to label F-actin, the drug is diluted 1:500 and incubated with the secondary antibodies.

[2405] Cells were washed 2×20 minutes at RT in PBS. The excess of buffer was removed and cells were mounted in a media containing an anti-bleaching agent (Vectashield, Vector Laboratories).

3 Immunoblot Analysis

[2406] To analyze expression levels of TAP-tagged proteins, a cell pellet (from a 6-well dish) was lyzed in 60 μl DNAse I buffer (5% Glycerol, 100 mM NaCl, 0.8% NP-40 (IGEPAL), 5 mM magnesium sulfate, 100 μg/ml DNAse I (Roche Diagnostics), 50 mM Tris, pH 7.5, protease inhibitor cocktail) for 15 min on ice. Each sample was split into two aliquots. The first half was centrifuged at 13,000 rpm for 5 min. to yield the NP-40-extractable material in the supernatant; the second half (total material) was carefully triturated. 50 μg each of the NP-40-extractable material and the total material are mixed with DTT-containing sample buffer for 30 min at 50° C. on a shaker and separated by SDS polyacrylamide gel electrophoresis on a precast 4-12% Bis-Tris gel (Invitrogen). Proteins were then transferred to nitrocellulose using a semi-dry procedure with a discontinuous buffer system. Briefly, gel and nitrocellulose membrane were stacked between filter papers soaked in either anode buffer (three layers buffer A1 (0.3 M Tris-HCl) and three layers buffer A2 (0.03 M Tris-HCl)) or cathode buffer (three layers of 0.03 M Tris-HCl, pH 9.4, 0.1% SDS, 40 mM □-aminocapronic acid). Electrotransfer of two gels at once was performed at 600 mA for 25 min. Transferred proteins were visualized with Ponceau S solution for one min to control transfer efficiency and then destained in water. The membrane was blocked in 5% non-fat milk powder in TBST (TBS containing 0.05% Tween-20) for 30 min at room temperature. It was subsequently incubated with HRP-coupled PAP antibody (1:5000 diluted in 5% milk/TBST) for 1 h at room temperature, washed three times for 10 min in TBST. The blot membrane was finally soaked in chemiluminescent substrate (ECL, Roche Diagnostics) for 2 min. and either exposed to X-ray film or analyzed on an imaging station.

### Example 4

### Purification or Protein Complexes

[2407] Protein complex purification was adapted to the sub-cellular localization of the TAP-tagged protein and was performed as described below.

1 Lysate Preparation for Cytoplasmic Proteins

[2408] About 1×10⁹ adherent cells (average) were harvested with a cell scrapper and washed 3 times in ice-cold PBS (3 min, 550 g). Collected cells were frozen in liquid nitrogen or immediately processed further. For cell lysis, the cell pellet was resuspended in 10 ml of CZ lysis buffer (50 mM Tris-Cl, pH 7.4; 5% Glycerol; 0.2% IGEPAL; 1.5 mM MgCl₂; 100 mM NaCl; 25 mM NaF; 1 mM Na₃VO₄; 1 mM DTT; containing 1 tablet of EDTA-free Protease inhibitor cocktail (Complete™, Roche) per 25 ml of buffer) and homogenized by 10 strokes of a tight-fitted pestle in a dounce homogenizer. The lysate was incubated for 30 min on ice and spun for 10 min at 20,000 g. The supernatant was subjected to an additional ultracentrifugation step for 1 h at 100,000 g. The supernatant was recovered and rapidly frozen in liquid nitrogen or immediately processed further.

2 Lysate Preparation for Membrane Proteins

[2409] About 1×10⁹ adherent cells (average) were harvested with a cell scrapper and washed 3 times in ice-cold PBS (3 min, 550 g). Collected cells were frozen in liquid nitrogen or immediately processed further. For cell lysis, the cell pellet was resuspended in 10 ml of Membrane-Lysis buffer (50 mM Tris, pH 7.4; 7.5% Glycerol; 1 mM EDTA; 150 mM NaCl; 25 mM NaF; 1 mM Na₃VO₄; 1 mM DTT; containing 1 tablet of EDTA-free Protease inhibitor cocktail (Complete™, Roche) per 25 ml of buffer) and homogenized by 10 strokes of a tight-fitted pestle in a dounce homogenizer. The lysate was spun for 10 min at 750 g, the supernatant was recovered and subjected to an ultracentrifugation step for 1 h at 100,000 g. The membrane pellet was resuspended in 7,5 ml of Membrane-Lysis buffer containing 0.8% n-Dodecyl-β-D-maltoside and incubated for 1 h at 4° C. with constant agitation. The sample was subjected to another ultracentifugation step for 1 h at 100,000 g and the solubilized material was quickly frozen in liquid nitrogen or immediately processed further.

3 Lysate Preparation for Nuclear Proteins

[2410] About 1×10⁹ adherent cells (average) were harvested with a cell scrapper and washed 3 times in ice-cold PBS (3 min, 550 g). Collected cells were frozen in liquid nitrogen or immediately processed further. For cell lysis, the cell pellet was resuspended in 10 ml of Hypotonic-Lysis buffer (10 mM Tris, pH 7.4; 1.5 mM MgCl₂; 10 mM KCl; 25 mM NaF; 1 mM Na₃VO₄; 1 mM DTT; containing 1 tablet of EDTA-free Protease inhibitor cocktail (Complete™, Roche) per 25 ml of buffer) and homogenized by 10 strokes of a tight-fitted pestle in a dounce homogenizer. The lysate was spun for 10 min at 2,000 g and the resulting supernatant (S1) saved on ice. The nuclear pellet (P1) was resuspended in 5 ml Nuclear-Lysis buffer (50 mM Tris, pH 7.4; 1.5 mM MgCl₂; 20% Glycerol; 420 mM NaCl; 25 mM NaF; 1 mM Na₃VO₄; 1 mM DTT; containing 1 tablet of EDTA-free Protease inhibitor cocktail (Complete™, Roche) per 25 ml of buffer) and incubated for 30 min on ice. The sample was combined with S1, further diluted with 7 ml of Dilution buffer (110 mM Tris, pH 7.4; 0.7% NP40; 1.5 mM MgCl₂; 25 mM NaF; 1 mM Na₃VO₄; 1 mM DTT), incubated on ice for 10 min and centrifuged at 100,000 g for 1 h. The final supernatant (S2) was frozen quickly in liquid nitrogen.

4 Tandem Affinity Purification

[2411] The frozen lysate was quickly thawed in a 37° C. water bath, and spun for 20 min at 100,000 g. The supernatant was recovered and incubated with 0.2 ml of settled rabbit IgG-Agarose beads (Sigma) for 2 h with constant agitation at 4° C. Immobilized protein complexes were washed with 10 ml of CZ lysis buffer (containing 1 Complete™ tablet (Roche) per 50 ml of buffer) and further washed with 5 ml of TEV cleavage buffer (10 mM Tris, pH 7.4; 100 mM NaCl; 0.1% IGEPAL; 0.5 mM EDTA; 1 mM DTT). Protein-complexes were eluted by incubation with 5 μl of TEV protease (GibcoBRL, Cat. No. 10127-017) for 1 h at 16° C. in 150 μl TEV cleavage buffer. The eluate was recovered and combined with 0.2 ml settled Calmodulin affinity beads (Stratagene) in 0.2 ml CBP binding buffer (10 mM Tris, pH 7.4; 100 mM NaCl; 0.1% IGEPAL; 2 mM MgAc; 2 mM imidazole; 1 mM DTT; 4 mM CaCl₂) followed by 1 h incubation at 4° C. with constant agitation. Immobilized protein complexes were washed with 10 ml of CBP wash buffer (10 mM Tris, pH 7.4; 100 mM NaCl; 0.1% IGEPAL; 1 mM MgAc; 1 mM Imidazole; 1 mM DTT; 2 mM CaCl₂) and eluted by addition of 600 μl CBP elution buffer (10 mM Tris, pH 8.0; 5 mM EGTA) for 5 min at 37° C. The eluate was recovered in a siliconzed tube and lyophilized. The remaining Calmodulin resin was boiled for 5 min in 50 μl 4× Laemmli sample buffer. The sample buffer was isolated, combined with the lyophilised fraction and loaded on a NuPAGE gradient gel (Invitrogen, 4-12%, 1.5 mm, 10 well).

### Example 5

### Protein Identification by Mass Spectrometry

1 Protein Digestion Prior to Mass Spectrometric Analysis

[2412] Gel-separated proteins were reduced, alkylated and digested in gel essentially following the procedure described by Shevchenko et al., 1996, Anal. Chem. 68:850-858. Briefly, gel-separated proteins were excised from the gel using a clean scalpel, reduced using 10 mM DTT (in 5 mM ammonium bicarbonate, 54° C., 45 min) and subsequently alkylated with 55 mM iodoacetamid (in 5 mM ammonium bicarbonate) at room temperature in the dark (30 min). Reduced and alkylated proteins were digested in gel with porcine trypsin (Promega) at a protease concentration of 12.5 ng/μl in 5 mM ammonium bicarbonate. Digestion was allowed to proceed for 4 hours at 37° C. and the reaction was subsequently stopped using 5 μl 5% formic acid.

2 Sample Preparation Prior to Analysis by Mass Spectrometry

[2413] Gel plugs were extracted twice with 20 μl 1% TFA and pooled with acidified digest supernatants. Samples were dried in a a vaccum centrifuge and resuspended in 13 μl 1% TFA.

3. Mass Spectrometric Data Acquisition

[2414] Peptide samples were injected into a nano LC system (CapLC, Waters or Ultimate, Dionex) which was directly coupled either to a quadrupole TOF (QTOF2, QTOF Ultima, QTOF Micro, Micromass or QSTAR Pulsar, Sciex) or ion trap (LCQ Deca XP) mass spectrometer. Peptides were separated on the LC system using a gradient of aqueous and organic solvents (see below). Solvent A was 5% acetonitrile in 0.5% formic acid and solvent B was 70% acetonitrile in 0.5% formic acid.

| Time (min) | % solvent A | % solvent B |
|---|---|---|
| 0 | 95 | 5 |
| 5.33 | 92 | 8 |
| 35 | 50 | 50 |
| 36 | 20 | 80 |
| 40 | 20 | 80 |
| 41 | 95 | 5 |
| 50 | 95 | 5 |

[2415] Peptides eluting off the LC system were partially sequenced within the mass spectrometer.

4. Protein Identification

[2416] The peptide mass and fragmentation data generated in the LC-MS/MS experiments were used to query fasta formatted protein and nucleotide sequence databases maintained and updated regularly at the NCBI (for the NCBInr, dbEST and the human and mouse genomes) and European Bioinformatics Institute (EBI, for the human, mouse, D. melanogaster and C. elegans proteome databases). Proteins were identified by correlating the measured peptide mass and fragmentation data with the same data computed from the entries in the database using the software tool Mascot (Matrix Science; Perkins et al., 1999, Electrophoresis 20:3551-3567). Search criteria varied depending on which mass spectrometer was used for the analysis.

### Example .6

### siRNA-Inhibition of FADS2, DEGS, SCD4

[2417] FADS2, DEGS and SCD4 were separately inhibited by siRNA-expression.

[2418] Resuts are depicted in FIGS. 3, 5, 7.

[2419] A RNAi gene expression perturbation strategy was employed for functional validation of FADS2 as an effector of APP processing: Two different siRNAs directed against FADS2 as well as siRNAs directed against BACE1 or Luc3 into SKNBE2 were transfected into neuroblastoma or H4 neuroglioma cells

[2420] siRNAs for human FADS2 were synthesized by Dharmacon Research Inc.

[2421] The sequences used for FADS2 are:

GCUGAAAUACCUGCCCUAC and GCAUGGCAUUGAAUACCAG

[2422] Transfection of SK-N-BE2 cells was performed using LipofectAMINE 2000 (Invitrogen) following the manufacturer's instructions. Briefly, the cells were seeded at a density of 1.0×104 cells in a final volume of 85 ul per 96-well 12-16 hrs prior to transfection. 25 nM of siRNAs were mixed with 8 ul Opti-MEM buffer (Gibco) and 60 ng carrier DNA, and the mixture was incubated for 20 minutes at room temperature before addition to the cells. 16 and 48 hrs post-transfection medium was replaced with 100 ul or 200 ul growth medium with or without serum, respectively. 72 hrs post-transfection 100 ul supernatants were harvested for A□42 ELISA. The assay was performed following the manufacturer's instructions (Innogenetics).

[2423] Transfection of H4 cells was performed using RNAiFect (Qiagen) following the manufacturer's instructions. Briefly, the cells were seeded at a density of 1.0×104 cells in a final volume of 100 ul per 96-well 12-16 hrs prior to transfection. 270 nM (0.375 ug) of siRNAs were mixed with 25 ul EC-R buffer and 2.3 ul of RNAiFect and incubated for 15 minutes at room temperature before addition to the cells. During complex formation medium on cells was replaced with 75 ul of fresh growth medium. 5 hrs post-transfection the cells were washed once with growth medium and 100 ul were added for further cultivation. 48 hrs post-transfection medium was replaced with 200 ul serum-free growth medium 72 hrs post-transfection 100 ul supernatants were harvested for A□42 ELISA. The assay was performed following the manufacturer's instructions (Innogenetics).

[2424] Knockdown efficiency of selected siRNAs was assessed at the protein level by co-transfecting siRNAs and corresponding TAP-tagged cDNA expression vectors or by using cell lines stably expressing the respective tagged protein of interest. 48 hrs post-transfection extracts were prepared, proteins separated by SDS-PAGE and transferred to nitrocellulose. Western blots were probed with antibodies directed against the tag and tubulin.

[2425] We noticed that like siRNAs directed against the known effector of APP processing, BACE1, those targeting PADS2 caused significant attenuation of Aβ1-42 secretion, whereas the Luc3 siRNA had no effect.

[2426] Thus, we could show, that surprisingly, FADS2 plays a functional role in the processing of APP. It was shown that by inhibiting FADS2, the production of the Aβ1-42 peptide could be reduced.

[2427] We confirmed that both FADS2 siRNAs did indeed interfere with expression of the desaturase by co-transfection of a FADS2-CTAP plasmid and FADS2 or Luc3 siRNAs into SKNBE2 and H4 cells. 48 h after transfection we determined expression levels of FADS2-CTAP by Western Blot analysis with anti-TAP antibodies.

### Example .7

### Determination of FADS2-Activity

A). Rat Liver Microsomal Assay

[2428] (Obukowicz M G, Raz A, Pyla P D, Rico J G, Wendling J M, Needleman P (1998a)

[2429] Identification and characterization of a novel delta6/delta5 fatty acid desaturase inhibitor as a potential anti-inflammatory agent. Biochem. Pharmacol. 1; 55(7): 1045-58; Obukowicz M G, Welsch D J, Salsgiver W J, Martin-Berger C L, Chinn K S, Duffin K L, Raz A, Needleman P (1998b) Novel, selective delta6 or delta5 fatty acid desaturase inhibitors as antiinflammatory agents in mice. J. Pharmacol. Exp. Ther. 287(1):157-66)

[2430] Rat microsomal membranes are obtained by standard biochemical fractionation procedures. In a 48-well plate the following components are mixed: a) 150 μl buffer/cofactors (250 mM sucrose, 150 mM KCl, 40 mM NaF, 1.3 mM ATP, 1 mg/ml MgCl2*5H₂O, 1.5 mM reduced glutathione, 60 μM reduced CoA, 330 μM nicotinamide, 670 μg/ml NADH, 100 mM sodium phosphate, pH 7.4); b) 50 μl rat liver micro-somes (˜500 μg total protein); c) 2.2 μl test compound (DMSO stock; 1% final DMSO concentration); d) 20 μl (0.05 μCi) ¹⁴C-Patty Acid Substrates.

[2431] Preferred substrate for FADS2 is α-linolenic acid (¹⁴C18:3n-3). [The assay allows for simultaneous measurement of FADS1 (Δ5 desaturase) and SCD-1 activity (Δ9 desaturase). The substrates for these enzymatic activities are ¹⁴C20:3n-3 and stearic acid (¹⁴C18:0), respectively.]

[2432] Samples are incubated at 37° C. for 1 hr, and then reactions are stopped and fatty acid ester linkages hydrolyzed by incubation with 200 μl 2.5N KOH in methanol:water (4:1) for 4 h at 65° C. Free fatty acids are protonated with 280 μl formic acid and extracted into organic phase (700 μl hexane). 200 μl from hexane layer are analyzed on AgNO₃-thin-layer chromatography (TLC) plates. Plates are dried over night and activity is quantified by phosphoimager. As an alternative to TLC analysis, separation of samples could be achieved by HPLC.

b) Cellular Assay

[2433] A cell line expressing high levels of FADS2 (such as ABMC-7 mastocytoma cells) is utilized. Cells are adapted to grow in serum-free HL-1 medium containing FADS2 substrates (such as 10 μM linoleic acid/15 μM fatty acid-free BSA). To measure FADS2 activity 2×10ˆ5 cells of are plated per 48-well and then incubated in medium containing 10 μM of a suitable substrate (such as α-linolenic acid (¹⁴C18:3n-3)). To terminate fatty acid metabolism, the cell layer is washed with PBS and 200 μl 2.5N KOH in methanol:water (4:1) are added. Samples are further processed as described above.

c) High-Troughput Screening Assays Using Fatty Acid Synthetic Enzymes (s. WO-03/019146, p. 27 ff.)

[2434] The assay utilizes position-specifically tritiated fatty acyl-CoA esters in a microsomal assay format (see above). The method detects the release of tritiated water and circumvents the requirement of TLC- or HPLC analysis of ¹⁴C-labeled fatty acids. For screening of FADS2 inhibitors suitable substrates (1 mCi/ml stock) are ³H [6,9,12-octadecadienoic acid] (CoA conjugate of linoleic acid) and/or ³H [9,12,15-octadecatrienoic acid] (CoA □-linolenic acid). The label should be position-specific at C6/C7.

[2435] Briefly, the following components are mixed (total volume: 100 μL): 2 μl unlabeled 1.5 mM fatty acyl CoA, 1 μl tritiated fatty acyl CoA, 10 μl 20 mM NADH, compounds from DMSO stock, 67 μl 100 mM phosphate buffer, pH 7.2. 80 μl of this mix are added to 20 μl of microsomes (˜20 μg total protein) and reaction is allowed to proceed for 5-30 min at RT. 10 μl 6% perchloric acid are added to stop the reaction. To sediment unused tritiated substrate, samples are vortexed with 100 μl charcoal suspension and centrifuged at 13,000 rpm for 10 min at 4° C. 400 μl of supernatant is analyzed in a liquid scintillation counter.

TABLE 1
COMPONENTS OF COMPLEXES

| Name of | | All interactors of the | Known interactors of the | Novel interactors of | Proteins of |
|---|---|---|---|---|---|
| complex | Entry Point | complex | complex | the complex | unknown function |
| Nicastrin | Nicastrin | 18 kDa microsomal | Aph-1a | 18 kDa microsomal | ATP-binding |
| complex (a) | | signal peptidase subunit | | signal peptidase subunit | cassette, sub-family |
| | | | | | A, member 3 |
| | | 25 kDa microsomal | BACE1 | 25 kDa microsomal | CGI-13 |
| | | signal peptidase subunit | | signal peptidase subunit | |
| | | Aph-1a | Nicastrin | ATP-binding cassette, | ENSG00000144840 |
| | | | | sub-family A, member 3 | |
| | | ATP-binding cassette, | Pen-2 | BSCv protein | FLJ20342 |
| | | sub-family A member 3 | | | |
| | | BACE1 | Presenilin-1 | Casein kinase II beta | FLJ20481 |
| | | | | chain | |
| | | BSCv protein | Presenilin-2 | Cathepsin B | FLJ22390 |
| | | Casein kinase II beta | | CGI-13 | Hypothetical protein |
| | | chain | | | tyrosine phosphatase |
| | | | | | ensg00000149185 |
| | | Cathepsin B | | Delta-6 fatty acid | KIAA1181 |
| | | | | desaturase | |
| | | CGI-13 | | ENSG00000144840 | KIAA1533 |
| | | Delta-6 fatty acid | | FLJ13977 | PP1, regulatory |
| | | desaturase | | | subunit 15B |
| | | ENSG00000144840 | | FLJ20342 | RING finger protein 5 |
| | | FLJ13977 | | FLJ20481 | Thioredoxin domain- |
| | | | | | containing protein |
| | | FLJ20342 | | FLJ22390 | |
| | | FLJ20481 | | Hypothetical protein | |
| | | | | tyrosine phosphatase | |
| | | | | ensg00000149185 | |
| | | FLJ22390 | | ICAM-2 | |
| | | Hypothetical protein | | KIAA1181 | |
| | | tyrosine phosphatase | | | |
| | | ensg00000149185 | | | |
| | | ICAM-2 | | KIAA1533 | |
| | | KIAA1181 | | Mesenchymal stem cell | |
| | | | | protein DSCD75 | |
| | | KIAA1533 | | Neurotrypsin | |
| | | Mesenchymal stem cell | | NICE-3 | |
| | | protein DSCD75 | | | |
| | | Neurotrypsin | | Protein amplified in | |
| | | | | osteosarcoma (OS-9) | |
| | | Nicastrin | | PP1, regulatory subunit | |
| | | | | 15B | |
| | | NICE-3 | | Protein similar to | |
| | | | | stromal cell-derived | |
| | | | | factor 2 | |
| | | Pen-2 | | Protocadherin beta 8 | |
| | | Presenilin-1 | | REP8 protein | |
| | | Presenilin-2 | | Retinal short-chain | |
| | | | | dehydrogenase/reductase | |
| | | | | retSDR2 | |
| | | Protein amplified in | | RING finger protein 5 | |
| | | osteosarcoma (OS-9) | | | |
| | | PP1, regulatory subunit | | Stromal cell-derived | |
| | | 15B | | factor 2-like 1 | |
| | | Protein similar to | | Thioredoxin domain- | |
| | | stromal cell-derived | | containing protein | |
| | | factor 2 | | | |
| | | Protocadherin beta 8 | | Voltage-dependent | |
| | | | | anion channel 1 | |
| | | REP8 protein | | | |
| | | Retinal short-chain | | | |
| | | dehydrogenase/reductase | | | |
| | | retSDR2 | | | |
| | | RING finger protein 5 | | | |
| | | Stromal cell-derived | | | |
| | | factor 2-like 1 | | | |
| | | Thioredoxin domain- | | | |
| | | containing protein | | | |
| | | Voltage-dependent | | | |
| | | anion channel 1 | | | |
| Nicastrin- | Nicastrin | 18 kDa microsomal | | 18 kDa microsomal | |
| complex (b) | | signal peptidase subunit | | signal peptidase subunit | |
| | | 25 kDa microsomal | | 25 kDa microsomal | |
| | | signal peptidase subunit | | signal peptidase subunit | |
| | | Aph-1a | Aph-1a | | |
| | | ATP-binding cassette, | | ATP-binding cassette, | ATP-binding |
| | | sub-family A, member 3 | | sub-family A, member 3 | cassette, sub-family |
| | | | | | A, member 3 |
| | | BACE1 | BACE1 | | |
| | | BSCv protein | | BSCv protein | |
| | | (FRAGMENT) | | (FRAGMENT) | |
| | | CAMK4 | | CAMK4 | |
| | | Casein kinase II beta | | Casein kinase II beta | |
| | | chain | | chain | |
| | | Cathepsin B | | Cathepsin B | |
| | | CGI-13 | | CGI-13 | CGI-13 |
| | | DCTN1 | | DCTN1 | |
| | | Delta-6 fatty acid | | Delta-6 fatty acid | |
| | | desaturase | | desaturase | |
| | | ENSG00000144840 | | ENSG00000144840 | ENSG00000144840 |
| | | FACL3 | | FACL3 | |
| | | FACL4 | | FACL4 | |
| | | FLJ13977 | | FLJ13977 | |
| | | FLJ20342 | | FLJ20342 | FLJ20342 |
| | | FLJ20481 | | FLJ20481 | FLJ20481 |
| | | FLJ22390 | | FLJ22390 | FLJ22390 |
| | | homolog of yeast golgi | | homolog of yeast golgi | |
| | | membrane protein yif1p | | membrane protein yif1p | |
| | | (yip1p-interacting | | (yip1p-interacting | |
| | | factor) | | factor) | |
| | | ICAM-2 | | ICAM-2 | |
| | | KIAA0095 | | KIAA0095 | KIAA0095 |
| | | KIAA0922 | | KIAA0922 | KIAA0922 |
| | | KIAA1181 | | KIAA1181 | KIAA1181 |
| | | (FRAGMENT) | | (FRAGMENT) | (FRAGMENT) |
| | | KIAA1533 | | KIAA1533 | KIAA1533 |
| | | (FRAGMENT) | | (FRAGMENT) | (FRAGMENT) |
| | | Mesenchymal stem cell | | Mesenchymal stem cell | |
| | | protein DSCD75 | | protein DSCD75 | |
| | | Neurotrypsin | | Neurotrypsin | |
| | | Nicastrin | Nicastrin | | |
| | | NICE-3 | | NICE-3 | |
| | | PAS domain containing | | PAS domain containing | |
| | | serine/threonine kinase | | serine/threonine kinase | |
| | | Pen-2 | Pen-2 | | |
| | | PP1, regulatory subunit | | PP1, regulatory subunit | PP1, regulatory |
| | | 15B | | 15B | subunit 15B |
| | | Presenilin-1 | Presenilin-1 | | |
| | | Presenilin-2 | Presenilin-2 | | |
| | | Protein amplified in | | Protein amplified in | |
| | | osteosarcoma (OS-9) | | osteosarcoma (OS-9) | |
| | | Protein similar to | | Protein similar to | |
| | | stromal cell-derived | | stromal cell-derived | |
| | | factor 2 | | factor 2 | |
| | | Protocadherin beta 8 | | Protocadherin beta 8 | |
| | | REP8 protein | | REP8 protein | |
| | | Retinal short-chain | | Retinal short-chain | |
| | | dehydrogenase/reductase | | dehydrogenase/reductase | |
| | | retSDR2 | | retSDR2 | |
| | | RING finger protein 5 | | RING finger protein 5 | RING finger protein 5 |
| | | Stromal cell-derived | | Stromal cell-derived | |
| | | factor 2-like 1 | | factor 2-like 1 | |
| | | Thioredoxin domain- | | Thioredoxin domain- | Thioredoxin domain- |
| | | containing protein | | containing protein | containing protein |
| | | tyrosine phosphatase | | tyrosine phosphatase | tyrosine phosphatase |
| | | ensg00000149185 | | ensg00000149185 | ensg00000149185 |
| Nicastrin- | Nicastrin | Nicastrin | Nicastrin | | |
| complex (c) | | | | | |
| | | Psen1 | | Psen1 | |
| | | aph-1a | | aph-1a | |
| | | APP | | APP | |
| | | CtnnA1 | | CtnnA1 | |
| | | CtnnA2 | | CtnnA2 | |
| | | CtnnB1 | | CtnnB1 | |
| | | CtnnD1 | | CtnnD1 | |
| | | JUP | | JUP | |
| | | NCadh | | NCadh | |
| | | ACAT1 | | ACAT1 | |
| | | CGI-13 | | CGI-13 | |
| | | CK2B | | CK2B | |
| | | CLGN | | CLGN | |
| | | ECSIT | | ECSIT | |
| | | FACL3 | | FACL3 | |
| | | FADS2 | | FADS2 | |
| | | FLJ20481 | | FLJ20481 | |
| | | ITM2C | | ITM2C | |
| | | ITPR1 | | ITPR1 | |
| | | KIAA0363 | | KIAA0363 | |
| | | MDR1 | | MDR1 | |
| | | Neurotrypsin | | Neurotrypsin | |
| | | PTP LOC114971 | | PTP LOC114971 | |
| | | RetSDR2 | | RetSDR2 | |
| | | SFXN1 | | SFXN1 | |
| | | SPC18 | | SPC18 | |
| | | SPC22 | | SPC22 | |
| | | SPC25 | | SPC25 | |
| | | SPTLC2 | | SPTLC2 | |
| | | stearoyl-CoA desaturase | | stearoyl-CoA | |
| | | | | desaturase | |
| | | STT3 | | STT3 | |
| | | TMP21 | | TMP21 | |
| | | UGCGL1 | | UGCGL1 | |
| | | visinin-like 1 | | visinin-like 1 | |
| | | Wolframin | | Wolframin | |
| | | YME1L1 | | YME1L1 | |
| BACE1 | BACE1 | BACE1 | BACE1 | | |
| (new)- | (new) | | | | |
| complex (a) | | | | | |
| | | Cadherin EGF LAG | | Cadherin EGF LAG | Cadherin EGF LAG |
| | | seven-pass G-type | | seven-pass G-type | seven-pass G-type |
| | | receptor 2 | | receptor 2 | receptor 2 |
| | | Calsyntenin 1 | | Calsyntenin 1 | |
| | | CGI-13 | | CGI-13 | |
| | | Delta-6 fatty acid | | Delta-6 fatty acid | |
| | | desaturase | | desaturase | |
| | | Delta-like homolog | | Delta-like homolog | |
| | | FLJ30668 | | FLJ30668 | FLJ30668 |
| | | FLJ39249 | | FLJ39249 | FLJ39249 |
| | | integral membrane | | integral membrane | |
| | | transporter protein | | transporter protein | |
| | | ITCH | | ITCH | |
| | | KIAA1250 | | KIAA1250 | KIAA1250 |
| | | kinectin 1 (kinesin | | kinectin 1 (kinesin | |
| | | receptor) | | receptor) | |
| | | Nicastrin | Nicastrin | | |
| | | Nogo-A | | Nogo-A | |
| | | PDGFRB | | PDGFRB | |
| | | PTK7 | | PTK7 | |
| | | SERPINA1 | | SERPINA1 | |
| | | SIM TO Y71H10A. 2.P. | | SIM TO Y71H10A. | SIM TO Y71H10A. |
| | | | | 2.P. | 2.P. |
| | | Sortilin-related receptor | | Sortilin-related receptor | |
| | | STX10 | | STX10 | |
| | | Thioredoxin domain- | | Thioredoxin domain- | Thioredoxin domain- |
| | | containing protein | | containing protein | containing protein |
| BACE1- | BACE1 | APP | APP | | |
| complex (b) | | | | | |
| | | Nicastrin | | Nicastrin | |
| | | ACAT1 | | ACAT1 | |
| | | APLP2 | | APLP2 | |
| | | BRI | | BRI | |
| | | calsyntenin 1 | | calsyntenin 1 | |
| | | CELSR2 | | CELSR2 | |
| | | CGI-13 | | CGI-13 | |
| | | DLK1 | | DLK1 | |
| | | DSCD75 | | DSCD75 | |
| | | FADS2 | | FADS2 | |
| | | GPR49 | | GPR49 | |
| | | ITM2C | | ITM2C | |
| | | KiDins220 | | KiDins220 | |
| | | LAPTM4B | | LAPTM4B | |
| | | Neurotrypsin | | Neurotrypsin | |
| | | NogoA | | NogoA | |
| | | OS-9 | | OS-9 | |
| | | PDGFRB | | PDGFRB | |
| | | PTK7 | | PTK7 | |
| | | RetSDR2 | | RetSDR2 | |
| | | S100alpha | | S100alpha | |
| | | SORL1 | | SORL1 | |
| | | stearoyl-CoA desaturase | | stearoyl-CoA | |
| | | | | desaturase | |
| | | TMP21 | | | |
| | | UGCGL1 | | | |
| Psen2- | Psen2 | aph-1a | aph-1a | | |
| complex | | | | | |
| | | Nicastrin | | Nicastrin | |
| | | Nicastrin | | Nicastrin | |
| | | CGI-13 | | CGI-13 | |
| | | DSCD75 | | DSCD75 | |
| | | ECSIT | | ECSIT | |
| | | FACL3 | | FACL3 | |
| | | FADS2 | | FADS2 | |
| | | FLJ10579 | | FLJ10579 | |
| | | FLJ20481 | | FLJ20481 | |
| | | ITPR1 | | ITPR1 | |
| | | KIAA0090 | | KIAA0090 | |
| | | MDR1 | | MDR1 | |
| | | NicAChRa3 | | NicAChRa3 | |
| | | PLD3 | | PLD3 | |
| | | SFXN1 | | SFXN1 | |
| | | SLC4A2 | | SLC4A2 | |
| | | SORT1 | | SORT1 | |
| | | SPC18 | | SPC18 | |
| | | SPC22 | | SPC22 | |
| | | SPC25 | | SPC25 | |
| | | SPTLC2 | | SPTLC2 | |
| | | stearoyl-CoA desaturase | | stearoyl-CoA | |
| | | | | desaturase | |
| | | STT3 | | STT3 | |
| | | TMP21 | | TMP21 | |
| | | VLCAD | | VLCAD | |
| | | Wolframin | | Wolframin | |
| | | YME1L1 | | YME1L1 | |
| PTK7- | PTK7 | APP | APP | | |
| complex | | | | | |
| | | BRI | | BRI | |
| | | CELSR2 | | CELSR2 | |
| | | DLK1 | | DLK1 | |
| | | FADS2 | | FADS2 | |
| | | HIFPH3/EGLN3 | | HIFPH3/EGLN3 | |
| | | ITM2C | | ITM2C | |
| | | Nap1-like | | Nap1-like | |
| | | Reelin | | Reelin | |

[2436] TABLE 2
INDIVIDUAL PROTEINS OF THE COMPLEXES

| | | | |
|---|---|---|---|
| Aph-1a | 1 | IPI00059964.1 | 28996 |
| JUP | 2 | IPI00028128.1 | 81498 |
| Psen1 | 3 | IPI00028077.1 | 52668 |
| ACAT1 | 4 | IPI00019898.3 | 64833 |
| BRI | 5 | IPI00031821.1 | 30338 |
| calsyntenin 1 | 6 | IPI00218869.1 | 108670 |
| DLK1 | 7 | IPI00218210.1 | 32910 |
| DSCD75 | 8 | IPI00010292.1 | 23865 |
| Nicastrin | 9 | IPI00021983.1 | 78411 |
| Pen-2 | 10 | IPI00020516.1 | 12029 |
| FACL3 | 11 | IPI00031397.1 | 80346 |
| FLJ10579 | 12 | IPI00018730.1 | 52118 |
| ITM2C | 13 | IPI00016014.1 | 30224 |
| Presenilin 1 | 14 | IPI00026333.1 | 52163 |
| Sortilin 1 | 15 | IPI00016022.1 | 92100 |
| ITPR1 | 16 | IPI00216955.1 | 314758 |
| KiDins220 | 17 | IPI00033429.1 | 197211 |
| MDR1 | 18 | IPI00027481.1 | 141463 |
| Neurotrypsin | 19 | IPI00011063.2 | 97067 |
| PLD3 | 20 | IPI00163951.2 | 49573 |
| RetSDR2 | 21 | IPI00008260.1 | 32964 |
| APLP2 | 22 | IPI00031030.1 | 86956 |
| APP | 23 | IPI00006608.1 | 86943 |
| SFXN1 | 24 | IPI00009368.2 | 35619 |
| SORL1 | 25 | IPI00022608.1 | 248441 |
| SPC18 | 26 | IPI00104128.1 | 20625 |
| SPC22 | 27 | IPI00030262.2 | 20253 |
| SPC25 | 28 | IPI00220125.1 | 25692 |
| stearoyl-CoA desaturase | 29 | IPI00013007.2 | 41523 |
| TMP21 | 30 | IPI00028055.1 | 24976 |
| VLCAD | 31 | IPI00163655.1 | 68788 |
| YME1L1 | 32 | IPI00099529.1 | 79832 |
| LAPTM4B | 33 | IPI00020093.1 | 31735 |
| S100alpha | 34 | IPI00220412.1 | 10546 |
| Cadherin EGF LAG | 35 | IPI00015346.1 | 317453 |
| seven-pass | | | |
| G-type receptor 2 | | | |
| Calsyntenin 1 | 36 | IPI00007257.1 | 109793 |
| visinin-like 1 | 37 | IPI00216313.1 | 22142 |
| BACE1 | 38 | IPI00216211.1 | 48212 |
| CELSR2 | 39 | IPI00015346.1 | 317453 |
| FADS2 (delta-6-desaturase) | 40 | IPI00183786.1 | 52259 |
| NogoA | 41 | IPI00219209.1 | 106360 |
| OS-9 | 42 | IPI00218476.1 | 76295 |
| PDGFRB | 43 | IPI00015902.2 | 124093 |
| PTK7 | 44 | IPI00219694.1 | 118392 |
| UGCGL1 | 45 | IPI00024466.1 | 177190 |
| CtnnB1 | 46 | IPI00017292.1 | |
| CtnnA1 | 47 | IPI00215948.1 | 102776 |
| CtnnA2 | 48 | IPI00030907.1 | 105282 |
| CtnnD1 | 49 | IPI00182469.2 | 107349 |
| NCadh | 50 | IPI00015717.1 | 99851 |
| Reelin | 51 | IPI00021018.1 | 388402 |
| Sortilin-related receptor | 52 | IPI00022608.1 | 248441 |
| 18 kDa microsomal signal | 53 | IPI00104128.1 | 20625 |
| peptidase subunit | | | |
| CLGN | 54 | IPI00183309.1 | 73577 |
| ECSIT | 55 | IPI00106506.1 | 49148 |
| FLJ20342 | 56 | IPI00015713.1 | 65084 |
| KIAA0090 | 57 | IPI00160376.1 | 111759 |
| NICE-3 | 58 | IPI00032413.1 | 28779 |
| CK2B | 59 | IPI00010865.1 | 24942 |
| PTP LOC114971 | 60 | IPI00174190.1 | 22844 |
| STT3 | 61 | IPI00102885.1 | 80530 |
| NicAChRa3 | 62 | IPI00007259.1 | 55637 |
| SLC4A2 | 63 | IPI00337431.3 | 137009 |
| HIFPH3/EGLN3 | 64 | IPI00004971.1 | 52259 |
| STX10 | 65 | IPI00012264.2 | 28114 |
| Presenilin 2 | 66 | IPI00028485.1 | 50140 |
| Wolframin | 67 | IPI00008711.1 | 100306 |
| BACE1 | 68 | IPI00011518.1 | 55764 |
| FLJ30668 | 69 | IPI00043733.1 | 33338 |
| BSCv protein | 70 | IPI00031131.1 | 46480 |
| FLJ39249 | 71 | IPI00167501.1 | 27459 |
| CGI-13 | 72 | IPI00008847.1 | 52917 |
| ITCH | 73 | IPI00061780.1 | 102803 |
| Casein kinase II beta chain | 74 | IPI00010865.1 | 24942 |
| Cathepsin B | 75 | IPI00013478.1 | 37808 |
| Delta-6 fatty acid desaturase (FADS2) | 76 | IPI00003544.1 | 52259 |
| Nogo-A | 77 | IPI00021766.3 | 129931 |
| PDGFRB | 78 | IPI00015902.1 | 123968 |
| ENSG00000144840 | 79 | IPI00102897.1 | 26308 |
| PTK7 | 80 | IPI00012719.1 | 118260 |
| FLJ13977 | 81 | IPI00025520.1 | 53482 |
| FLJ20481 | 82 | IPI00016418.1 | 47655 |
| SERPINA1 | 83 | IPI00032180.1 | 46737 |
| FLJ22390 | 84 | IPI00009343.1 | 17098 |
| SIM TO Y71H10A. 2.P. | 85 | IPI00170775.1 | 68184 |
| Hypothetical protein tyrosine | 86 | IPI00102935.1 | 22844 |
| phosphatase | | | |
| ensg00000149185 | | | |
| ICAM-2 | 87 | IPI00009477.1 | 30653 |
| KIAA1181 | 88 | IPI00003635.1 | 36879 |
| KIAA1533 | 89 | IPI00001841.1 | 72964 |
| kinectin 1 (kinesin receptor) | 90 | IPI00032968.1 | 156093 |
| Mesenchymal stem cell protein | 91 | IPI00010292.1 | 23865 |
| DSCD75 | | | |
| Neurotrypsin | 92 | IPI00011063.1 | 97012 |
| PP1, regulatory subunit 15B | 93 | IPI00045837.1 | 79125 |
| Protein amplified in osteosarcoma | 94 | IPI00013268.1 | 75562 |
| (OS-9) | | | |
| Protein similar to stromal cell-derived | 95 | IPI00034198.1 | 23026 |
| factor 2 | | | |
| Protocadherin beta 8 | 96 | IPI00009033.1 | 87624 |
| REP8 protein | 97 | IPI00010353.1 | 30541 |
| RING finger protein 5 | 98 | IPI00012608.1 | 19881 |
| Retinal short-chain dehydrogenase/ | 99 | IPI00008260.1 | 32964 |
| reductase retSDR2 | | | |
| Stromal cell-derived factor 2-like 1 | 100 | IPI00106642.2 | 23511 |
| Thioredoxin domain-containing protein | 101 | IPI00001028.1 | 32535 |
| Voltage-dependent anion channel 1 | 102 | IPI00010430.1 | 30641 |
| ATP-binding cassette, sub-family A | 103 | IPI00017800.1 | 191388 |
| member 3 | | | |
| CAMK4 | 104 | IPI00002921.1 | 51926 |
| KIAA0363 | 105 | IPI00004538.1 | 156999 |
| DCTN1 | 106 | IPI00011446.1 | 127404 |
| KIAA1250 | 107 | IPI00033429.1 | 197211 |
| FACL3 | 108 | IPI00031397.1 | 80346 |
| FACL4 | 109 | IPI00029737.1 | 79188 |
| KIAA0095 | 110 | IPI00005680.1 | 93488 |
| KIAA0922 | 111 | IPI00021671.1 | 138688 |
| PAS domain containing serine/threonine | 112 | IPI00141040.1 | 142859 |
| kinase | | | |
| homolog of yeast golgi membrane | 113 | IPI00063544.1 | 33834 |
| protein yif1p | | | |
| (yip1p-interacting factor) | | | |
| Integral membrane transporter protein | 114 | IPI00020093.1 | 31735 |
| GPR49 | 115 | IPI00021131.1 | 99998 |
| NAP-1 related protein/NAP-1-like | 116 | IPI00155244.1 | 44159 |
| protein | | | |
| SPTLC2 | 117 | IPI00005751.1 | 62924 |
| Delta-like homolog | 118 | IPI00009191.1 | 41143 |
| 25 kDa microsomal signal peptidase | 119 | IPI00014148.1 | 25003 |
| subunit | | | |
| APP-C99 | 120 | | 11278 |
| Psen2 | 121 | IPI00028485.1 | 50140 |

[2437] TABLE 3
BIOCHEMICAL ACTIVITIES OF THE COMPLEXES

| Name of Complex | Biochemical activity |
|---|---|
| Nicastrin-complex | Gamma-secretase activity and assembly |
| | (trafficking) |
| Bace1-complex | APP processing beta-secretase |
| Psen-2-complex | Gamma-secretase activity |
| PTK7-complex | Role in neuronal signal transduction; |
| | involved in neural development and |
| | structural plasticity of the CNS; modulator of |
| | BACE function. |

[2438] The present invention is not to be limited in scope by the specific embodiments described herein. Indeed, various modifications of the invention in addition to those described herein will become apparent to those skilled in the art from the foregoing description and accompanying figures. Such modifications are intended to fall within the scope of the appended claims.

[2439] Various publications are cited herein, the disclosures of which are incorporated by reference in their entireties.

[2440] The invention further relates to the use of a FADS2 interacting molecule for the modulation of beta secretase and/or gamma secretase activity in vitro. With respect to this use of the invention, all embodiments with respect to the FADS2 interacting molecule and to the modulation of beta secretase and/or gamma secretase activity as present above in the context of the use of a FADS2 interacting molecule for the preparation of a pharmaceutical composition for the treatment of neurodegenerative diseases also apply.

The application's sequence listing, which the Patent Office published only in electronic form, follows.

SEQUENCE LISTING (125 sequences)

SEQ ID NO: 1 - protein, 265 aa, Homo sapiens
MGAAVFFGCTFVAFGPAFALFLITVAGDPLRVIILVAGAFFWLVSLLLASVVWFILVHVTDRSDARLQYGLLIFGAAVSVLLQEVFRFAYYKLLKKADEGLASLSEDGRSPISIRQMAYVSGLSFGIISGVFSVINILADALGPGVVGIHGDSPYYFLTSAFLTAAIILLHTFWGVVFFDACERRRYWALGLVVGSHLLTSGLTFLNPWYEASLLPIYAVTVSMGLWAFITAGGSLRSIQRSLLCRRQEDSRVMVYSALRIPPED

SEQ ID NO: 2 - protein, 743 aa, Homo sapiens
EVMNLMEQPIKVTEWQQTYTYDSGIHSGANTCVPSVSSKGIMEEDEACGRQYTLKKTTTYTQGVPPSQGDLEYQMSTTARAKRVREAMCPGVSGEGQLALLATQVEGQATNLQRLAEPSQLLKSAIVHLINYQDDAELVTRALPELTKLLNDEDPVVVTKAAMIVNQLSKKEASRRALMGSPQLVAAVVRTMQNTSDLDTARCTTSILHNLSHHREGLLAIFKSGGIPALVRMLSSPVESVLFYAITTLHNLLLYQEGAKMACAGRRAQKMVPLLNKNNPKFLAITTDCLQLLAYGNQESKLIILANGGPQALVQIMRNYSYEKLLWTTSRVLKVLSVCPSNKPAIVEAGGMQALGKHLTSNSPRLVQNCLWTLRNLSDVATKQEGLESVLKILVNQLSVDDVNVLTCATGTLSNLTCNNSKNKTLVTQNSGVEALIHAILRAGDKDDITEPAVCALRHLTSRHPEAEMAQNSVRLNYGIPAIVKLLNQPNQWPLVKATIGLIRNLALCPANHAPLQEAAVIPRLVQLLVKAHQDAQRHVAAGTQQPYTDGVRMEEIVEGCTGALHILARDPMNRMEIFRLNTIPLFVQLLYSSVENIQRVAAGVLCELAQDKEAADAIDAEGASAPLMELLHSRNEGTATYAAAVLFRISEDKNPDYRKRVSVELTNSLFKHDPAAWEAAQSMIPINEPYGDDMDATYRPMYSSDVPLDPLEMHMDMDGDYPIDTYSDGLRPPYPTADHMLA

SEQ ID NO: 3 - protein, 467 aa, Homo sapiens
MTELPAPLSYFQNAQMSEDNHLSNTVRSQNDNRERQEHNDRRSLGHPEPLSNGRPQGNSRQVVEQDEEEDEELTLKYGAKHVIMLFVPVTLCMVVVVATIKSVSFYTRKDGQLIYTPFTEDTETVGQRALHSILNAAIMISVIVVMTILLVVLYKYRCYKVIHAWLIISSLLLLFFFSFIYLGEVFKTYNVAVDYITVALLIWNFGVVGMISIHWKGPLRLQQAYLIMISALMALVFIKYLPEWTAWLILAVISVYDLVAVLCPKGPLRMLVETAQERNETLFPALIYSSTMVWLVNMAEGDPEAQRRVSKNSKYNAESTERESQDTVAENDDGGFSEEWEAQRDSHLGPHRSTPESRAAVQELSSSILAGEDPEERGVKLGLGDFIFYSVLVGKASATASGDWNTTIACFVAILIGLCLTLLLLAIFKKALPALPISITFGLVFYFATDYLVQPFMDQLAFHQFYI

SEQ ID NO: 4 - protein, 551 aa, Homo sapiens
MVGEEKMSLRNRLSKSRENPEEDEDQRNPAKESLETPSNGRIDIKQLIAKKIKLTAEAEARLKPFFMKEVGSHFDDFVTNLIEKSASLDNGGCALTTFSVLEGEKNNHRAKDLRAPPEQGKIFIARRSLLDELLEVDHIRTIYHMFIALLILFILSTLVVDYIDEGRLVLEFSLLSYAFGKFPTVVWTWWIMFLSTFSVPYFLFQHWATGYSKSSHPLIRSLFHGFLFMIFQIGVLGFGPTYVVLAYTLPPASRFIIIFEQIRFVMKAHSFVRENVPRVLNSAKEKSSTVPIPTVNQYLYFLFAPTLIYRDSYPRNPTVRWGYVAMKFAQVFGCFFYVYYIFERLCAPLFRNIKQEPFSARVLVLCVFNSILPGVLILFLTFFAFLHCWLNAFAEMLRFGDRMFYKDWWNSTSYSNYYRTWNVVVHDWLYYYAYKDFLWFFSKRFKSAAMLAVFAVSAVVHEYALAVCLSFFYPVLFVLFMFFGMAFNFIVNDSRKKPIWNVLMWTSLFLGNGVLLCFYSQEWYARQHCPLKNPTFLDYVRPRSWTCRYVF

SEQ ID NO: 5 - protein, 266 aa, Homo sapiens
MVKVTFNSALAQKEAKKDEPKSGEEALIIPPDAVAVDCKDPDDVVPVGQRRAWCWCMCFGLAFMLAGVILGGAYLYKYFALQPDDVYYCGIKYIKDDVILNEPSADAPAALYQTIEENIKIFEEEEVEFISVPVPEFADSDPANIVHDFNKKLTAYLDLNLDKCYVIPLNTSIVMPPRNLLELLINIKAGTYLPQSYLIHEHMVITDRIENIDHLGFFIYRLCHDKETYKLQRRETIKGIQKREASNCFAIRHFENKFAVETLICS

SEQ ID NO: 6 - protein, 971 aa, Homo sapiens
MLRRPAPALAPAARLLLAGLLCGGGVWAARVNKHKPWLEPTYHGIVTENDNTVLLDPPLIALDKDAPLRFAGEICGFKIHGQNVPFDAVVVDKSTGEGVIRSKEKLDCELQKDYSFTIQAYDCGKGPDGTNVKKSHKATVHIQVNDVNEYAPVFKEKSYKATVIEGKQYDSILRVEAVDADCSPQFSQICSYEIITPDVPFTVDKDGYIKNTEKLNYGKEHQYKLTVTAYDCGKKRATEDVLVKISIKPTCTPGWQGWNNRIEYEPGTGALAVFPNIHLETCDEPVASVQATVELETSHIGKGCDRDTYSEKSLHRLCGAAAGTAELLPSPSGSLNWTMGLPTDNGHDSDQVFEFNGTQAVRIPDGVVSVSPKEPFTISVWMRHGPFGRKKETILCSSDKTDMNRHHYSLYVHGCRLIFLFRQDPSEEKKYRPAEFHWKLNQVCDEEWHHYVLNVEFPSVTLYADGTSHEPFSVTEDYPLHPSKIETQLVVGACWQEFSGVENDNETEPVTVACAGGDLHMTQFFRGNLAGLTLRSGKLADKKVIDCLYTCKEGLDLQVLEDSGRGVQIQAHRSQLVLTLEGEDLGELDKAMQHISYLNSRQFPTPGIRRLKITSTIKCFNEATCISVPPVDGYVMVLQPEEPKISLSGVHHFARAASEFESSEGVFLFPELRIISTITREVEPEGDGAEDPTVQESLVSEEIVHDLDTCEVTVEGEELNHEQESLEVDMARLQQKGIEVSSSELGMTFTGVDTMASYEEVLHLLRYRNWHARSLLDRKFKLICSELNGRYISNEFKVEVNVIHTANPMEHANHMAAQPQFVHPEHRSFVDLSGHNLANPHPFAVVHSTATVVIVVCVSSLVFMIILGVFRIRAAHRRTMRDQDTGKENEMDWDDSALTITVNPMETYEDQHSSEEEEEEEEEEESEDGEEEDDITSAESESSEEEEGEQGDPQNATRQQQLEWDDSTLSY

SEQ ID NO: 7 - protein, 310 aa, Homo sapiens [sequence omitted]

SEQ ID NO: 8 - protein, 208 aa, Homo sapiens
MLGLLVALLALGLAVFALLDVWYLVRLPCAVLRARLLQPRVRDLLAEQRFPGRVLPSDLDLLLHMNNARYLREADFARVAHLTRCGVLGALRELRAHTVLAASCARHRRSLRLLEPFEVRTRLLGWDDRAFYLEARFVSLRDGFVCALLRFRQHLLGTSPERVVQHLCQRRVEPPELPADLQHWISYNEASSQLLRMESGLSDVTKDQ

SEQ ID NO: 9 - protein, 709 aa, Homo sapiens
MATAGGGSGADPGSRGLLRLLSFCVLLAGLCRGNSVERKIYIPLNKTAPCVRLLNATHQIGCQSSISGDTGVIHVVEKEEDLQWVLTDGPNPPYMVLLESKHFTRDLMEKLKGRTSRIAGLAVSLTKPSPASGFSPSVQCPNDGFGVYSNSYGPEFAHCREIQWNSLGNGLAYEDFSFPIFLLEDENETKVIKQCYQDHNLSQNGSAPTFPLCAMQLFSHMHAVISTATCMRRSSIQSTFSINPEIVCDPLSDYNVWSMLKPINTTGTLKPDDRVVVAATRLDSRSFFWNVAPGAESAVASFVTQLAAAEALQKAPDVTTLPRNVMFVFFQGETFDYIGSSRMVYDMEKGKFPVQLENVDSFVELGQVALRTSLELWMHTDPVSQKNESVRNQVEDLLATLEKSGAGVPAVILRRPNQSQPLPPSSLQRFLRARNISGVVLADHSGAFHNKYYQSIYDTAENINVSYPEWLSPEEDLNFVTDTAKALADVATVLGRALYELAGGTNFSDTVQADPQTVTRLLYGFLIKANNSWFQSILRQDLRSYLGDGPLQHYIAVSSPTNTTYVVQYALANLTGTVVNLTREQCQDPSKVPSENKDLYEYSWVQGPLHSNETDRLPRCVRSTARLARALSPAFELSQWSSTEYSTWTESRWKDIRARIFLIASKELELITLTVGFGILIFSLIVTYCINAKADVLFIAPREPGAVSY

SEQ ID NO: 10 - protein, 101 aa, Homo sapiens
MNLERVSNEEKLNLCRKYYLGGFAFLPFLWLVNIFWFFREAFLVPAYTEQSQIKGYVWRSAVGFLFWVIVLTSWITIFQIYRPRWGALGDYLSFTIPLGTP

SEQ ID NO: 11 - protein, 720 aa, Homo sapiens
MNNHVSSKPSTMKLKHTINPILLYFIHFLISLYTILTYIPFYFFSESRQEKSNRIKAKPVNSKPDSAYRSVNSLDGLASVLYPGCDTLDKVFTYAKNKFKNKRLLGTREVLNEEDEVQPNGKIFKKVILGQYNWLSYEDVFVRAFNFGNGLQMLGQKPKTNIAIFCETRAEWMIAAQACFMYNFQLVTLYATLGGPAIVHALNETEVTNIITSKELLQTKLKDIVSLVPRLRHIITVDGKPPTWSDFPKGIIVHTMAAVEALGAKASMENQPHSKPLPSDIAVIMYTSGSTGLPKGVMISHSNIIAGITGMAERIPELGEEDVYIGYLPLAHVLELSAELVCLSHGCRIGYSSPQTLADQSSKIKKGSKGDTSMLKPTLMAAVPEIMDRIYKNVMNKVSEMSSFQRNLFILAYNYKMEQISKGRNTPLCDSFVFRKVRSLLGGNIRLLLCGGAPLSATTQRFMNICFCCPVGQGYGLTESAGAGTISEVWDYNTGRVGAPLVCCEIKLKNWEEGGYFNTDKPHPRGEILIGGQSVTMGYYKNEAKTKADFSEDENGQRWLCTGDIGEFEPDGCLKIIDRKKDLVKLQAGEYVSLGKVEAALKNLPLVDNICAYANSYHSYVIGFVVPNQKELTELARKKGLKGTWEELCNSCEMENEVLKVLSEAAISASLEKFEIPVKIRLSPEPWTPETGLVTDAFKLKRKELKTHYQADIERMYGRK

SEQ ID NO: 12 - protein, 470 aa, Homo sapiens
MSRLGALGGARAGLGLLLGTAAGLGFLCLLYSQRWKRTQRHGRSQSLPNSLDYTQTSDPGRHVMLLRAVPGGAGDASVLPSLPREGQEKVLDRLDFVLTSLVALRREVEELRSSLRGLAGEIVGEVRCHMEENQRVARRRRFPFVRERSDSTGSSSVYFTASSGATFTDAESEGGYTTANAESDNERDSDKESEDGEDEVSCETVKMGRKDSLDLEEEAASGASSALEAGGSSGLEDVLPLLQQADELHRGDEQGKREGFQLLLNNKLVYGSRQDFLWRLARAYSDMCELTEEVSEKKSYALDGKEEAEAALEKGDESADCHLWYAVLCGQLAEHESIQRRIQSGFSFKEHVDKAIALQPENPMAHFLLGRWCYQVSHLSWLEKKTATALLESPLSATVEDALQSFLKAEELQPGFSKAGRVYISKCYRELGKNSEARWWMKLALELPDVTKEDLAIQKDLEELEVILRD

SEQ ID NO: 13 - protein, 267 aa, Homo sapiens
MVKISFQPAVAGIKGDKADKASASAPAPASATEILLTPAREEQPPQHRSKRGGSVGGVCYLSMGMVVLLMGLVFASVYIYRYFFLAQLARDNFFRCGVLYEDSLSSQVRTQMELEEDVKIYLDENYERINVPVPQFGGGDPADIIHDFQRGLTAYHDISLDKCYVIELNTTIVLPPRNFWELLMNVKRGTYLPQTYIIQEEMVVTEHVSDKEALGSFIYHLCNGKDTYRLRRRATRRRINKRGAKNCNAIRHFENTFVVETLICGVV

SEQ ID NO: 14 - protein, 463 aa, Homo sapiens
MTELPAPLSYFQNAQMSEDNHLSNTNDNRERQEHNDRRSLGHPEPLSNGRPQGNSRQVVEQDEEEDEELTLKYGAKHVIMLFVPVTLCMVVVVATIKSVSFYTRKDGQLIYTPFTEDTETVGQRALHSILNAAIMISVIVVMTILLVVLYKYRCYKVIHAWLIISSLLLLFFFSFIYLGEVFKTYNVAVDYITVALLIWNLGVVGMISIHWKGPLRLQQAYLIMISALMALVFIKYLPEWTAWLILAVISVYDLVAVLCPKGPLRMLVETAQERNETLFPALIYSSTMVWLVNMAEGDPEAQRRVSKNSKYNAESTERESQDTVAENDDGGFSEEWEAQRDSHLGPHRSTPESRAAVQELSSSILAGEDPEERGVKLGLGDFIFYSVLVGKASATASGDWNTTIACFVAILIGLCLTLLLLAIFKKALPALPISITFGLVFYFATDYLVQPFMDQLAFHQFYI

SEQ ID NO: 15 - protein, 831 aa, Homo sapiens [sequence omitted]

SEQ ID NO: 16 - protein, 2764 aa, Homo sapiens
MSDKMSSFLHIGDICSLYAEGSTNGFISTLGLVDDRCVVQPETGDLNNPPKKFRDCLFKLCPMNRYSAQKQFWKAAKPGANSTTDAVLLNKLHHAADLEKKQNETENRKLLGTVIQYGNVIQLLHLKSNKYLTVNKRLPALLEKNAMRVTLDEAGNEGSWFYIQPFYKLRSIGDSVVIGDKVVLNPVNAGQPLHASSHQLVDNPGCNEVNSVNCNTSWKIVLFMKWSDNKDDILKGGDVVRLFHAEQEKFLTCDEHRKKQHVFLRTTGRQSATSATSSKALWEVEVVQHDPCRGGAGYWNSLFRFKHLATGHYLAAEVDPDFEEECLEFQPSVDPDQDASRSRLRNAQEKMVYSLVSVPEGNDISSIFELDPTTLRGGDSLVPRNSYVRLRHLCTNTWVHSTNIPIDKEEEKPVMLKIGTSPVKEDKEAFAIVPVSPAEVRDLDFANDASKVLGSIAGKLEKGTITQNERRSVTKLLEDLVYFVTGGTNSGQDVLEVVFSKPNRERQKLMREQNILKQIFKLLQAPFTDCGDGPMLRLEELGDQRHAPFRHICRLCYRVLRHSQQDYRKNQEYIAKQFGFMQKQIGYDVLAEDTITALLHNNRKLLEKHITAAEIDTFVSLVRKNREPRFLDYLSDLCVSMNKSIPVTQELICKAVLNPTNADILIETKLVLSRFEFEGVSSTGENALEAGEDEEEVWLFWRDSNKEIRSKSVRELAQDAKEGQKEDRDVLSYYRYQLNLFARMCLDRQYLAINEISGQLDVDLILRCMSDENLPYDLRASFCRLMLHMHVDRDPQEQVTPVKYARLWSEIPSEIAIDDYDSSGASKDEIKERFAQTMEFVEEYLRDVVCQRFPFSDKEKNKLTFEVVNLARNLIYFGFYNFSDLLRLTKILLAILDCVHVTTIFPISKMAKGEENKGNNDVEKLKSSNVMRSIHGVGELMTQVVLRGGGFLPMTPMAAAPEGNVKQAEPEKEDIMVMDTKLKIIEILQFILNVRLDYRISCLLCIFKREFDESNSQTSETSSGNSSQEGPSNVPGALDFEHIEEQAEGIFGGRKVYFHEENTPLDLDDHGGRTFLRVLLHLTMHDYPPLVSGALQLLFRHFSQRQEVLQAFKQVQLLVTSQDVDNYKQIKQDLDQLRSIVEKSELWVYKGQGPDETMDGASGENEHKKTEEGNNKPQKHESTSSYNYRVVKEILIRLSKLCVQESASVRKSRKQQQRLLRNMGAHAVVLELLQIPYEKAEDTKMQEIMRLAHEFLQNFCAGNQQNQALLHKHINLFLNPGILEAVTMQHIFMNNFQLCSEINERVVQHFVHCIETHGRNVQYIKFLQTIVKAEGKFIKKCQDMVMAELVNSGEDVLVFYNDRASFQTLIQMMRSERDRMDENSPLMYHIHLVELLAVCTEGKNVYTEIKCNSLLPLDDIVRVVTHEDCIPEVKIAYINFLNHCYVDTEVEMKEIYTSNHMWKLFENFLVDICRACNNTSDRKHADSILEKYVTEIVMSIVTTFFSSPFSDQSTTLQTRQPVFVQLLQGVFRVYHCNWLMPSQKASVESCIRVLSDVAKSRAIAIPVDLDSQVNNLFLKSHSIVQKTAMNWRLSARNAARRDSVLAASRDYRNIIERLQDIVSALEDRLRPLVQAELSVLVDVLHRPELLFPENTDARRKCESGGFICKLIKHTKQLLEENEEKLCIKVLQTLREMMTKDRGYGEKLISIDELDNAELPPAPDSENATEELEPSPPLRQLEDHKRGEALRQVLVNRYYGNVRPSGRRESLTSFGNGPLSAGGPGKPGGGGGGSGSSSMSRGEMSLAEVQCHLDKEGASNLVIDLIMNASSDRVFHESILLAIALLEGGNTTIQHSFFCRLTEDKKSEKFFKVFYDRMKVAQQEIKATVTVNTSDLGNKKKDDEVDRDAPSRKKAKEPTTQITEEVRDQLLEASAATRKAFTTFRREADPDDHYQPGEGTQATADKAKDDLEMSAVITIMQPILRFLQLLCENHNRDLQNFLRCQNNKTNYNLVCETLQFLDCICGSTTGGLGLLGLYINEKNVALINQTLESLTEYCQGPCHENQNCIATHESNGIDIITALILNDINPLGKKRMDLVLELKAKNASKLLLAIMESRHDSENAERILYNMRPKELVEVIKKAYMQGEVEFEDGENGEDGAASPRNVGHNIYILAHQLARHNKELQSMLKPGGQVDGDEALEFYAKHTAQIEIVRLDRTMEQIVFPVPSICEFLTKESKLRIYYTTERDEQGSKINDFFLRSEDLFNEMNWQKKLRAQPVLYWCARNMSFWSSISFNLAVLMNLLVAFFYPFKGVRGGTLEPHWSGLLWTAMLISLAIVIALPKPHGIRALIASTILRLIFSVGLQPTLFLLGAFNVCNKIIFLMSFVGNCGTFTRGYRAMVLDVEFLYHLLYLVICAMGLFVHEFFYSLLLFDLVYREETLLNVIKSVTRNGRSIILTAVLALILVYLFSIVGYLFFKDDFILEVDRLPNETAVPETGESLASEFLFSDVCRVESGENCSSPAPREELVPAEETEQDKEHTCETLLMCIVTVLSHGLRSGGGVGDVLRKPSKEEPLFAARVIYDLLFFFMVIIIVLNLIFGVIIDTFADLRSEKQKKEEILKTTCFICGLERDKFDNKTVTFEEHIKEEHNMWHYLCFIVLVKVKDSTEYTGPESYVAEMIKERNLDWFPRMRAMSLVSSDSEGEQNELRNLQEKLESTMKLVTNLSGQLSELKDQMTEQRKQKQRIGLLGHPPHMNVNPQQPA

SEQ ID NO: 17 - protein, 1777 aa, Homo sapiens
LQLSVKMSVLISQSVINYVEEENIPALKALLEKCKDVDERNECGQTPLMIAAEQGNLEIVKELIKNGANCNLEDLDNWTALISASKEGHVHIVEELLKCGVNLEHRDMGGWTALMWACYKGRTDVVELLLSHGANPSVTGLYSVYPIIWAAGRGHADIVHLLLQNGAKVNCSDKYGTTPLVWAARKGHLECVKHLLAMGADVDQEGANSMTALIVAVKGGYTQSVKEILKRNPNVNLTDKDGNTALMIASKEGHTEIVQDLLDAGTYVNIPDRSGDTVLIGAVRGGHVEIVRALLQKYADIDIRGQDNKTALYWAVEKGNATMVRDILQCNPDTEICTKDGETPLIKATKMRNIEVVELLLDKGAKVSAVDKKGDTPLHIAIRGRSRKLAELLLRNPKDGRLLYRPNKAGETPYNIDCSHQKSILTQIFGARHLSPTETDGDMLGYDLYSSALADILSEPTMQPPICVGLYAQWGSGKSFLLKKLEDEMKTFAGQQIEPLFQFSWLIVFLTLLLCGGLGLLFAFTVHPNLGIAVSLSFLALLYIFFIVIYFGGRREGESWNWAWVLSTRLARHIGYLELLLKLMFVNPPELPEQTTKALPVRFLFTDYNRLSSVGGETSLAEMIATLSDACEREFGFLATRLFRVFKTEDTQGKKKWKKTCCLPSFVIFLFIIGCIISGITLLAIFRVDPKHLTVNAVLISIASVVGLAFVLNCRTWWQVLDSLLNSQRKRLHNAASKLHKLKSEGFMKVLKCEVELMARMAKTIDSFTQNQTRLVVIIDGLDACEQDKVLQMLDTVRVLFSKGPFIAIFASDPHIIIKAINQNLNSVLRDSNINGHDYMRNIVHLPVFLNSRGLSNARKFLVTSATNGDVPCSDTTGIQEDADRRVSQNSLGEMTKLGSKTALNRRDTYRRRQMQRTITRQMSFDLTKLLVTEDWFSDISPQTMRRLLNIVSVTGRLLRANQISFNWDRLASWINLTEQWPYRTSWLILYLEETEGIPDQMTLKTIYERISKNIPTTKDVEPLLEIDGDIRNFEVFLSSRTPVLVARDVKVFLPCTVNLDPKLREIIADVRAAREQISIGGLAYPPLPLHEGPPRAPSGYSQPPSVCSSTSFNGPFAGGVVSPQPHSSYYSGMTGPQHPFYNRPFFAPYLYTPRYYPGGSQHLISRPSVKTSLPRDQNNGLEVIKEDAAEGLSSPTDSSRGSGPAPGPVVLLNSLNVDAVCEKLKQIEGLDQSMLPQYCTTIKKANINGRVLAQCNIDELKKEMNMNFGDWHLFRSTVLEMRNAESHVVPEDPRFLSESSSGPAPHGEPARRASHNELPHTELSSQTPYTLNFSFEELNTLGLDEGAPRHSNLSWQSQTRRTPSLSSLNSQDSSIEISKLTDKVQAEYRDAYREYIAQMSQLEGGPGSTTISGRSSPHSTYYMGQSSSGGSIHSNLEQEKGKDSEPKPDDGRKSFLMKRGDVIDYSSSGVSTNDASPLDPITEEDEKSDQSGSKLLPGKKSSERSSLFQTDLKLKGSGLRYQKLPSDEDESGTEESDNTPLLKDDKDRKAEGKVERVPKSPEHSAEPIRTFIKAKEYLSDALLDKKDSSDSGVRSSESSPNHSLHNEVADDSQLEKANLIELEDDSHSGKRGIPHSLSGLQDPIIARMSICSEDKKSPSECSLIASSPEENWPACQKAYNLNRTPSTVTLNNNSAPANRANQNFDEMEGIRETSQVILRPSSSPNPTTIQNENLKSMTHKRSQRSSYTRLSKDPPELHAAASSESTGFGEERESIL

SEQ ID NO: 18 - protein, 1280 aa, Homo sapiens
MDLEGDRNGGAKKKNFFKLNNKSEKDKKEKKPTVSVFSMFRYSNWLDKLYMVVGTLAAIIHGAGLPLMMLVFGEMTDIFANAGNLEDLMSNITNRSDINDTGFFMNLEEDMTRYAYYYSGIGAGVLVAAYIQVSFWCLAAGRQIHKIRKQFFHAIMRQEIGWFDVHDVGELNTRLTDDVSKINEGIGDKIGMFFQSMATFFTGFIVGFTRGWKLTLVILAISPVLGLSAAVWAKILSSFTDKELLAYAKAGAVAEEVLAAIRTVIAFGGQKKELERYNKNLEEAKRIGIKKAITANISIGAAFLLIYASYALAFWYGTTLVLSGEYSIGQVLTVFFSVLIGAFSVGQASPSIEAFANARGAAYEIFKIIDNKPSIDSYSKSGHKPDNIKGNLEFRNVHFSYPSRKEVKILKGLNLKVQSGQTVALVGNSGCGKSTTVQLMQRLYDPTEGMVSVDGQDIRTINVRFLREIIGVVSQEPVLFATTIAENIRYGRENVTMDEIEKAVKEANAYDFIMKLPHKFDTLVGERGAQLSGGQKQRIAIARALVRNPKILLLDEATSALDTESEAVVQVALDKARKGRTTIVIAHRLSTVRNADVIAGFDDGVIVEKGNHDELMKEKGIYFKLVTMQTAGNEVELENAADESKSEIDALEMSSNDSRSSLIRKRSTRRSVRGSQAQDRKLSTKEALDESIPPVSFWRIMKLNLTEWPYFVVGVFCAIINGGLQPAFAIIFSKIIGVFTRIDDPETKRQNSNLFSLLFLALGIISFITFFLQGFTFGKAGEILTKRLRYMVFRSMLRQDVSWFDDPKNTTGALTTRLANDAAQVKGAIGSRLAVITQNIANLGTGIIISFIYGWQLTLLLLAIVPIIAIAGVVEMKMLSGQALKDKKELEGAGKIATEAIENFRTVVSLTQEQKFEHMYAQSLQVPYRNSLRKAHIFGITFSFTQAMMYFSYAGCFRFGAYLVAHKLMSFEDVLLVFSAVVFGAMAVGQVSSFAPDYAKAKISAAHIIMIIEKTPLIDSYSTEGLMPNTLEGNVTFGEVVFNYPTRPDIPVLQGLSLEVKKGQTLALVGSSGCGKSTVVQLLERFYDPLAGKVLLDGKEIKRLNVQWLRAHLGIVSQEPILFDCSIAENIAYGDNSRVVSQEEIVRAAKEANIHAFIESLPNKYSTKVGDKGTQLSGGQKQRIAIARALVRQPHILLLDEATSALDTESEKVVQEALDKAREGRTCIVIAHRLSTIQNADLIVVFQNGRVKEHGTHQQLLAQKGIYFSMVSVQAGTKRQ

SEQ ID NO: 19 - protein, 875 aa, Homo sapiens
MTLARFVLALMLGALPEVVGFDSVLNDSLHHSHRHSPPAGPHYPYYLPTQQRPPRTRPPPPLPRFPRPPRALPAQRPHALQAGHTPRPHPWGCPAGEPWVSVTDFGAPCLRWAEVPPFLERSPPASWAQLRGQRHNFCRSPDGAGRPWCFYGDARGKVDWGYCDCRHGSVRLRGGKNEFEGTVEVYASGVWGTVCSSHWDDSDASVICHQLQLGGKGIAKQTPFSGLGLIPIYWSNVRCRGDEENILLCEKDIWQGGVCPQKMAAAVTCSFSHGPTFPIIRLAGGSSVHEGRVELYHAGQWGTVCDDQWDDADAEVICRQLGLSGIAKAWHQAYFGEGSGPVMLDEVRCTGNELSIEQCPKSSWGEHNCGHKEDAGVSCTPLTDGVIRLAGGKGSHEGRLEVYYRGQWGTVCDDGWTELNTYVVCRQLGFKYGKQASANHFEESTGPIWLDDVSCSGKETRFLQCSRRQWGRHDCSHREDVSIACYPGGEGHRLSLGFPVRLMDGENKKEGRVEVFINGQWGTICDDGWTDKDAAVICRQLGYKGPARARTMAYFGEGKGPIHVDNVKCTGNERSLADCIKQDIGRHNCRHSEDAGVICDYFGKKASGNSNKESLSSVCGLRLLHRRQKRIIGGKNSLRGGWPWQVSLRLKSSHGDGRLLCGATLLSSCWVLTAAHCFKRYGNSTRSYAVRVGDYHTLVPEEFEEEIGVQQIVIHREYRPDRSDYDIALVRLQGPEEQCARFSSHVLPACLPLWRERPQKTASNCYITGWGDTGRAYSRTLQQAAIPLLPKRFCEERYKGRFTGRMLCAGNLHEHKRVDSCQGDSGGPLMCERPGESWVVYGVTSWGYGCGVKDSPGVYTKVSAFVPWIKSVTKL

SEQ ID NO: 20 - protein, 446 aa, Homo sapiens
LAVVGFGALMTQLFLWEYGDLHLFGPNQRPAPCYDPCEAVLVESIPEGLDFPNASTGNPSTSQAWLGLLAGAHSSLDIASFYWTLTNNDTHTQEPSAQQGEEVLRQLQTLAPKGVNVRIAVSKPSGPQPQADLQALLQSGAQVRMVDMQKLTHGVLHTKFWVVDQTHFYLGSANMDWRSLTQVKELGVVMYNCSCLARDLTKIFEAYWFLGQAGSSIPSTWPRFYDTRYNQETPMEICLNGTPALAYLASAPPPLCPSGRTPDLKALLNVVDNARSFIYVAVMNYLPTLEFSHPHRFWPAIDDGLRRATYERGVKVRLLISCWGHSEPSMRAFLLSLAALRDNHTHSDIQVKLFVVPADEAQARIPYARVNHNKYMVTERATYIGTSNWSGNYFTETAGTSLLVTQNGRGGLRSQLEAIFLRDWDSPYSHDLDTSADSVGNACRLL

SEQ ID NO: 21 - protein, 300 aa, Homo sapiens
MKFLLDILLLLPLLIVCSLESFVKLFIPKRRKSVTGEIVLITGAGHGIGRLTAYEFAKLKSKLVLWDINKHGLEETAAKCKGLGAKVHTFVVDCSNREDIYSSAKKVKAEIGDVSILVNNAGVVYTSDLFATQDPQIEKTFEVNVLAHFWTTKAFLPAMTKNNHGHIVTVASAAGHVSVPFLLAYCSSKFAAVGFHKTLTDELAALQITGVKTTCLCPNFVNTGFIKNPSTSLGPTLEPEEVVNRLMHGILTEQKMIFIPSSIAFLTTLERILPERFLAVLKRKISVKFDAVIGYKMKAQ

SEQ ID NO: 22 - protein, 763 aa, Homo sapiens
MAATGTAAAAATGRLLLLLLVGLTAPALALAGYIEALAANAGTGFAVAEPQIAMFCGKLNMHVNIQTGKWEPDPTGTKSCFETKEEVLQYCQEMYPELQITNVMEANQRVSIDNWCRRDKKQCKSRFVTPFKCLVGEFVSDVLLVPEKCQFFHKERMEVCENHQHWHTVVKEACLTQGMTLYSYGMLLPCGVDQFHGTEYVCCPQTKIIGSVSKEEEEEDEEEEEEEDEEEDYDVYKSEFPTEADLEDFTEAAVDEDDEDEEEGEEVVEDRDYYYDTFKGDDYNEENPTEPGSDGTMSDKEITHDVKAVCSQEAMTGPCRAVMPRWYFDLSKGKCVRFIYGGCGGNRNNFESEDYCMAVCKAMIPPTPLPTNDVDVYFETSADDNEHARFQKAKEQLEIRHRNRMDRVKKEWEEAELQAKNLPKAERQTLIQHFQAMVKALEKEAASEKQQLVETHLARVEAMLNDRRRMALENYLAALQSDPPRPHRILQALRRYVRAENKDRLHTIRHYQHVLAVDPEKAAQMKSQVMTHLHVIEERRNQSLSLLYKVPYVAQEIQEEIDELLQEQRADMDQFTASISETPVDVRVSSEESEEIPPFHPFHPFPALPENEDTQPELYHPMKKGSGVGEQDGGLIGAEEKVINSKNKVDENMVIDETLDVKEMIFNAERVGGLEEERESVGPLREDFSLSSSALIGLLVIAVAIATVIVISLVMLRKRQYGTISHGIVEVDPMLTPEERHLNKMQNHGYENPTYKYLEQMQI

SEQ ID NO: 23 - protein, 770 aa, Homo sapiens
MLPGLALLLLAAWTARALEVPTDGNAGLLAEPQIAMFCGRLNMHMNVQNGKWDSDPSGTKTCIDTKEGILQYCQEVYPELQITNVVEANQPVTIQNWCKRGRKQCKTHPHFVIPYRCLVGEFVSDALLVPDKCKFLHQERMDVCETHLHWHTVAKETCSEKSTNLHDYGMLLPCGIDKFRGVEFVCCPLAEESDNVDSADAEEDDSDVWWGGADTDYADGSEDKVVEVAEEEEVAEVEEEEADDDEDDEDGDEVEEEAEEPYEEATERTTSIATTTTTTTESVEEVVREVCSEQAETGPCRAMISRWYFDVTEGKCAPFFYGGCGGNRNNFDTEEYCMAVCGSAMSQSLLKTTQEPLARDPVKLPTTAASTPDAVDKYLETPGDENEHAHFQKAKERLEAKHRERMSQVMREWEEAERQAKNLPKADKKAVIQHFQEKVESLEQEAANERQQLVETHMARVEAMLNDRRRLALENYITALQAVPPRPRHVFNMLKKYVRAEQKDRQHTLKHFEHVRMVDPKKAAQIRSQVMTHLRVIYERMNQSLSLLYNVPAVAEEIQDEVDELLQKEQNYSDDVLANMISEPRISYGNDALMPSLTETKTTVELLPVNGEFSLDDLQPWHSFGADSVPANTENEVEPVDARPAADRGLTTRPGSGLTNIKTEEISEVKMDAEFRHDSGYEVHHQKLVFFAEDVGSNKGAIIGLMVGGVVIATVIVITLVMLKKKQYTSIHHGVVEVDAAVTPEERHLSKMQQNGYENPTYKFFEQMQN

SEQ ID NO: 24 - protein, 322 aa, Homo sapiens
MSGELPPNINIKEPRWDQSTFIGRANHFFTVTDPRNILLTNEQLESARKIVHDYRQGIVPPGLTENELWRAKYIYDSAFHPDTGEKMILIGRMSAQVPMNMTITGCMMTFYRTTPAVLFWQWINQSFNAVVNYTNRSGDAPLTVNELGTAYVSATTGAVATALGLNALTKHVSPLIGRFVPFAAVAAANCINIPLMRQRELKVGIPVTDENGNRLGESANAAKQAITQVVVSRILMAAPGMAIPPFIMNTLEKKAFLKRFPWMSAPIQVGLVGFCLVFATPLCCALFPQKSSMSVTSLEAELQAKIQESHPELRRVYFNKGL

SEQ ID NO: 25 - protein, 2214 aa, Homo sapiens
MATRSSRRESRLPFLFTLVALLPPGALCEVWTQRLHGGSAPLPQDRGFLVVQGDPRELRLWARGDARGASRADEKPLRRKRSAALQPEPIKVYGQVSLNDSHNQMVVHWAGEKSNVIVALARDSLALARPKSSDVYVSYDYGKSFKKISDKLNFGLGNRSEAVIAQFYHSPADNKRYIFADAYAQYLWITFDFCNTLQGFSIPFRAADLLLHSKASNLLLGFDRSHPNKQLWKSDDFGQTWIMIQEHVKSFSWGIDPYDKPNTIYIERHEPSGYSTVFRSTDFFQSRENQEVILEEVRDFQLRDKYMFATKVVHLLGSEQQSSVQLWVSFGRKPMRAAQFVTRHPINEYYIADASEDQVFVCVSHSNNRTNLYISEAEGLKFSLSLENVLYYSPGGAGSDTLVRYFANEPFADFHRVEGLQGVYIATLINGSMNEENMRSVITFDKGGTWEFLQAPAFTGYGEKINCELSQGCSLHLAQRLSQLLNLQLRRMPILSKESAPGLIIATGSVGKNLASKTNVYISSSAGARWREALPGPHYYTWGDHGGIITAIAQGMETNELKYSTNEGETWKTFIFSEKPVFVYGLLTEPGEKSTVFTIFGSNKENVHSWLILQVNATDALGVPCTENDYKLWSPSDERGNECLLGHKTVFKRRTPHATCFNGEDFDRPVVVSNCSCTREDYECDFGFKMSEDLSLEVCVPDPEFSGKSYSPPVPCPVGSTYRRTRGYRKISGDTCSGGDVEARLEGELVPCPLAEENEFILYAVRKSIYRYDLASGATEQLPLTGLRAAVALDFDYEHNCLYWSDLALDVIQRLCLNGSTGQEVIINSGLETVEALAFEPLSQLLYWVDAGFKKIEVANPDGDFRLTIVNSSVLDRPRALVLVPQEGVMFWTDWGDLKPGIYRSNMDGSAAYHLVSEDVKWPNGISVDDQWIYWTDAYLECIERITFSGQQRSVILDNLPHPYAIAVFKNEIYWDDWSQLSIFRASKYSGSQMEILANQLTGLMDMKIFYKGKNTGSNACVPRPCSLLCLPKANNSRSCRCPEDVSSSVLPSGDLMCDCPQGYQLKNNTCVKEENTCLRNQYRCSNGNCINSIWWCDFDNDCGDMSDERNCPTTICDLDTQFRCQESGTCIPLSYKCDLEDDCGDNSDESHCEMHQCRSDEYNCSSGMCIRSSWVCDGDNDCRDWSDEANCTAIYHTCEASNFQCRNGHCIPQRWACDGDTDCQDGSDEDPVNCEKKCNGFRCPNGTCIPSSKHCDGLRDCSDGSDEQHCEPLCTHFMDFVCKNRQQCLFHSMVCDGIIQCRDGSDEDAAFAGCSQDPEFHKVCDEFGFQCQNGVCISLIWKCDGMDDCGDYSDEANCENPTEAPNCSRYFQFRCENGHCIPNRWKCDRENDCGDWSDEKDCGDSHILPFSTPGPSTCLPNYYRCSSGTCVMDTWVCDGYRDCADGSDEEACPLLANVTAASTPTQLGRCDRFEFECHQPKTCIPNWKRCDGHQDCQDGRDEANCPTHSTLTCMSREFQCEDGEACIVLSERCDGFLDCSDESDEKACSDELTVYKVQNLQWTADFSGDVTLTWMRPKKMPSASCVYNVYYRVVGESIWKTLETHSNKTNTVLKVLKPDTTYQVKVQVQCLSKAHNTNDFVTLRTPEGLPDAPRNLQLSLPREAEGVIVGHWAPPIHTHGLIREYIVEYSRSGSKMWASQRAASNFTEIKNLLVNTLYTVRVAAVTSRGIGNWSDSKSITTIKGKVIPPPDIHIDSYGENYLSFTLTMESDIKVNGYVVNLFWAFDTHKQERRTLNFRGSILSHKVGNLTAHTSYEISAWAKTDLGDSPLAFEHVMTRGVRPPAPSLKAKAINQTAVECTWTGPRNVVYGIFYATSFLDLYRNPKSLTTSLHNKTVIVSKDEQYLFLVRVVVPYQGPSSDYVVVKMIPDSRLPPRHLHVVHTGKTSVVIKWESPYDSPDQDLLYAIAVKDLIRKTDRSYKVKSRNSTVEYTLNKLEPGGKYHIIVQLGNMSKDSSIKITTVSLSAPDALKIITENDHVLLFWKSLALKEKHFNESRGYEIHMFDSAMNITAYLGNTTDNFFKISNLKMGHNYTFTVQARCLFGNQICGEPAILLYDELGSGADASATQAARSTDVAAVVVPILFLILLSLGVGFAILYTKHRRLQSSFTAFANSHYSSRLGSAIFSSGDDLGEDDEDAPMITGFSDDVPMVIA

SEQ ID NO: 26 - protein, 179 aa, Homo sapiens
MLSLDFLDDVRRMNKRQLYYQVLNFGMIVSSALMIWKGLMVITGSESPIVVVLSGSMEPAFHRGDLLFLTNRVEDPIRVGEIVVFRIEGREIPIVHRVLKIHEKQNGHIKFLTKGDNNAVDDRGLYKQGQHWLEKKDVVGRARGFVPYIGIVTILMNDYPKFKYAVLFLLGLFVLVHRE

SEQ ID NO: 27 - protein, 180 aa, Homo sapiens
MNTVLSRANSLFAFSLSVMAALTFGCFITTAFKDRSVPVRLHVSRIMLKNVEDFTGPRERSDLGFITSDITADLENIFDWNVKQLFLYLSAEYSTKNNALNQVVLWDKIVLRGDNPKLLLKDMKTKYFFFDDGNGLKGNRNVTLTLSWNVVPNAGILPLVTGSGHVSVPFPDTYEITKSY

SEQ ID NO: 28 - protein, 232 aa, Homo sapiens
MAAAAVQGGRSGGSGGCSGAGGASNCGTGSGRSGLLDKWKIDDKPVKIDKWDGSAVKNSLDDSAKKVLLEKYKYVENFGLIDGRLTICTISCFFAIVALIWDYMHPFPESKPVLALCVISYPLFMLSFVMMGILTIYTSYKEKSIFLVAHRKDPTGMDPDDIWQLSSSLKRFDDKYTLKLTFISGRTKQQREAEFTKSIAKFFDHSGTLVMDAYEPEISRLHDSLAIERKIK

SEQ ID NO: 29 - protein, 359 aa, Homo sapiens
MPAHLLQDDISSSYTTTTTITAPPSRVLQNGGDKLETMPLYLEDDIRPDIKDDIYDPTYKDKEGPSPKVEYVWRNIILMSLLHLGALYGITLIPTCKFYTWLWGVFYYFVSALGITAGAHRLWSHRSYKARLPLRLFLIIANTMAFQNDVYEWARDHRAHHKFSETHADPHNSRRGFFFSHVGWLLVRKHPAVKEKGSTLDLSDLEAEKLVMFQRRYYKPGLLMMCFILPTLVPWYFWGETFQNSVFVATFLRYAVVLNATWLVNSAAHLFGYRPYDKNISPRENILVSLGAVGEGFHNYHHSFPYDYSASEYRWHINFTTFFIDCMAALGLAYDRKKVSKAAILARIKRTGDGNYKSG

SEQ ID NO: 30 - protein, 219 aa, Homo sapiens
MSGLSGPPARRGPFPLALLLLFLLGPRLVLAISFHLPINSRKCLREEIHKDLLVTGAYEISDQSGGAGGLRSHLKITDSAGHILYSKEDATKGKFAFTTEDYDMFEVCFESKGTGRIPDQLVILDMKHGVEAKNYEEIAKVEKLKPLEVELRRLEDLSESIVNDFAYMKKREEEMRDTNESTNTRVLYFSIFSMFCLIGLATWQVFYLRRFFKAKKLIE

SEQ ID NO: 31 - protein, 621 aa, Homo sapiens [sequence omitted]

SEQ ID NO: 32 - protein, 716 aa, Homo sapiens
MFSLSSTVQPQVTVPLSHLINAFHTPKNTSVSLSGVSVSQNQHRDVVPEHEAPSSEPSLNLRDLGLSELKIGQIDQLVENLLPGFCKGKNISSHWHTSHVSAQSFFENKYGNLDIFSTLRSSCLYRHHSRALQSICSDLQYWPVFIQSRGFKTLKSRTRRLQSTSERLAETQNIAPSFVKGFLLRDRGSDVESLDKLMKTKNIPEAHQDAFKTGFAEGFLKAQALTQKTNDSLRRTRLILFVLLLFGIYGLLKNPFLSVRFRTTTGLDSAVDPVQMKNVTFEHVKGVEEAKQELQEVVEFLKNPQKFTILGGKLPKGILLVGPPGTGKTLLARAVAGEADVPFYYASGSEFDEMFVGVGASRIRNLFREAKANAPCVIFIDELDSVGGKRIESPMHPYSRQTINQLLAEMDGFKPNEGVIIIGATNFPEALDNALIRPGRFDMQVTVPRPDVKGRTEILKWYLNKIKFDQSVDPEIIARGTVGFSGAELENLVNQAALKAAVDGKEMVTMKELEFSKDKILMGPERRSVEIDNKNKTITAYHESGHAIIAYYTKDAMPINKATIMPRGPTLGHVSLLPENDRWNETRAQLLAQMDVSMGGRVAEELIFGTDHITTGASSDFDNATKIAKRMVTKFGMSEKLGVMTYSDTGKLSPETQSAIEQEIRILLRDSYERAKHILKTHAKEHKNLAEALLTYETLDAKEIQIVLEGKKLEVR

SEQ ID NO: 33 - protein, 283 aa, Homo sapiens
MVNYAWAGRSQRKLWWRSVAVLTCKSVVRPGYRGGLQARRSTLLKTCARARATAPGAMKMVAPWTRFYSNSCCLCCHVRTGTILLGVWYLIINAVVLLILLSALADPDQYNFSSSELGGDFEFMDDANMCIAIAISLLMILICAMATYGAYKQRAAWIIPFFCYQIFDFALNMLVAITVLIYPNSIQEYIRQLPPNFPYRDDVMSVNPTCLVLIILLFISIILTFKGYLISCVWNCYRYINGRNSSDVLVYVTSNDTTVLLPPYDDATVNGAAKEPPPPYVSA

SEQ ID NO: 34 - protein, 94 aa, Homo sapiens
MGSELETAMETLINVFHAHSGKEGDKYKLSKKELKELLQTELSGFLDAQKDVDAVDKVMKELDENGDGEVDFQEYVVLVAALTVACNNFFWENS

SEQ ID NO: 35 - protein, 2923 aa, Homo sapiens
MRSPATGVPLPTPPPPLLLLLLLLLPPPLLGDQVGPCRSLGSRGRGSSGACAPMGWLCPSSASNLWLYTSRCRDAGTELTGHLVPHHDGLRVWCPESEAHIPLPPAPEGCPWSCRLLGIGGHLSPQGKLTLPEEHPCLKAPRLRCQSCKLAQAPGLRAGERSPEESLGGRRKRNVNTAPQFQPPSYQATVPENQPAGTPVASLRAIDPDEGEAGRLEYTMDALFDSRSNQFFSLDPVTGAVTTAEELDRETKSTHVFRVTAQDHGMPRRSALATLTILVTDTNDHDPVFEQQEYKESLRENLEVGYEVLTVRATDGDAPPNANILYRLLEGSGGSPSEVFEIDPRSGVIRTRGPVDREEVESYQLTVEASDQGRDPGPRSTTAAVFLSVEDDNDNAPQFSEKRYVVQVREDVTPGAPVLRVTASDRDKGSNAVVHYSIMSGNARGQFYLDAQTGALDVVSPLDYETTKEYTLRVRAQDGGRPPLSNVSGLVTVQVLDINDNAPIFVSTPFQATVLESVPLGYLVLHVQAIDADAGDNARLEYRLAGVGHDFPFTINNGTGWISVAAELDREEVDFYSFGVEARDHGTPALTASASVSVTVLDVNDNNPTFTQPEYTVRLNEDAAVGTSVVTVSAVDRDAHSVITYQITSGNTRNRFSITSQSGGGLVSLALPLDYKLERQYVLAVTASDGTRQDTAQIVVNVTDANTHRPVFQSSHYTVNVNEDRPAGTTVVLISATDEDTGENARITYFMEDSIPQFRIDADTGAVTTQAELDYEDQVSYTLAITARDNGIPQKSDTTYLEILVNDVNDNAPQFLRDSYQGSVYEDVPPFTSVLQISATDRDSGLNGRVFYTFQGGDDGDGDFIVESTSGIVRTLRRLDRENVAQYVLRAYAVDKGMPPARTPMEVTVTVLDVNDNPPVFEQDEFDVFVEENSPIGLAVARVTATDPDEGTNAQIMYQIVEGNIPEVFQLDIFSGELTALVDLDYEDRPEYVLVIQATSAPLVSRATVHVRLLDRNDNPPVLGNFEILFNNYVTNRSSSFPGGAIGRVPAHDPDISDSLTYSFERGNELSLVLLNASTGELKLSRALDNNRPLEAIMSVLVSDGVHSVTAQCALRVTIITDEMLTHSITLRLEDMSPERFLSPLLGLFIQAVAATLATPPDHVVVFNVQRDTDAPGGHILNVSLSVGQPPGPGGGPPFLPSEDLQERLYLNRSLLTAISAQRVLPFDDNICLREPCENYMRCVSVLRFDSSAPFIASSSVLFRPIHPVGGLRCRCPPGFTGDYCETEVDLCYSRPCGPHGRCRSREGGYTCLCRDGYTGEHCEVSARSGRCTPGVCKNGGTCVNLLVGGFKCDCPSGDFEKPYCQVTTRSFPAHSFITFRGLRQRFHFTLALSFATKERDGLLLYNGRFNEKHDFVALEVIQEQVQLTFSAGESTTTVSPFVPGGVSDGQWHTVQLKYYNKPLLGQTGLPQGPSEQKVAVVTVDGCDTGVALRFGSVLGNYSCAAQGTQGGSKKSLDLTGPLLLGGVPDLPESFPVRMRQFVGCMRNLQVDSRHIDMADFIANNGTVPGCPAKKNVCDSNTCHNGGTCVNQWDAFSCECPLGFGGKSCAQEMANPQHFLGSSLVAWHGLSLPISQPWYLSLMFRTRQADGVLLQAITRGRSTITLQLREGHVMLSVEGTGLQASSLRLEPGRANDGDWHHAQLALGASGGPGHAILSFDYGQQRAEGNLGPRLHGLHLSNITVGGIPGPAGGVARGFRGCLQGVRVSDTPEGVNSLDPSHGESINVEQGCSLPDPCDSNPCPANSYCSNDWDSYSCSCDPGYYGDNCTNVCDLNPCEHQSVCTRKPSAPHGYTCECPPNYLGPYCETRIDQPCPRGWWGHPTCGPCNCDVSKGFDPDCNKTSGECHCKENHYRPPGSPTCLLCDCYPTGSLSRVCDPEDGQCPCKPGVIGRQCDRCDNPFAEVTTNGCEVNYDSCPRAIEAGIWWPRTRFGLPAAAPCPKGSFGTAVRHCDEHRGWLPPNLFNCTSITFSELKGFAERLQRNESGLDSGRSQQLALLLRNATQHTAGYFGSDVKVAYQLATRLLAHESTQRGFGLSATQDVHFTENLLRVGSALLDTANKRHWELIQQTEGGTAWLLQHYEAYASALAQNMRHTYLSPFTIVTPNIVISVVRLDKGNFAGAKLPRYEALRGEQPPDLETTVILPESVFRETPPVVRPAGPGEAQEPEELARRQRRHPELSQGEAVASVIIYRTLAGLLPHNYDPDKRSLRVPKRPIINTPVVSISVHDDEELLPRALDKPVTVQFRLLETEERTKPICVFWNHSILVSGTGGWSARGCEVVFRNESHVSCQCNHMTSFAVLMDVSRRENGEILPLKTLTYVALGVTLAALLLTFFFLTLLRILRSNQHGIRRNLTAALGLAQLVFLLGINQADLPFACTVIAILLHFLYLCTFSWALLEALHLYRALTEVRDVNTGPMRFYYMLGWGVPAFITGLAVGLDPEGYGNPDFCWLSIYDTLIWSFAGPVAFAVSMSVFLYILAARASCAAQRQGFEKKGPVSGLQPSFAVLLLLSATWLLALLSVNSDTLLFHYLFATCNCIQGPFIFLSYVVLSKEVRKALKLACSRKPSPDPALTTKSTLTSSYNCPSPYADGRLYQPYGDSAGSLHSTSRSGKSQPSYIPFLLREESALNPGQGPPGLGDPGSLFLEGQDQQHDPDTDSDSDLSLEDDQSGSYASTHSSDSEEEEEEEEEEAAFPGEQGWDSLLGPGAERLPLHSTPKDGGPGPGKAPWPGDFGTTAKESSGNGAPEERLRENGDALSREGSLGPLPGSSAQPHKGILKKKCLPTISEKSSLLRLPLEQCTGSSRGSSASEGSRGGPPPRPPPRQSLQEQLNGVMPIAMSIKAGTVDEDSSGSEFLFFNFLH

SEQ ID NO: 36 - protein, 981 aa, Homo sapiens
MLRRPAPALAPAARLLLAGLLCGGGVWAARVNKHKPWLEPTYHGIVTENDNTVLLDPPLIALDKDAPLRFAESFEVTVTKEGEICGFKIHGQNVPFDAVVVDKSTGEGVIRSKEKLDCELQKDYSFTIQAYDCGKGPDGTNVKKSHKATVHIQVNDVNEYAPVFKEKSYKATVIEGKQYDSILRVEAVDADCSPQFSQICSYEIITPDVPFTVDKDGYIKNTEKLNYGKEHQYKLTVTAYDCGKKRATEDVLVKISIKPTCTPGWQGWNNRIEYEPGTGALAVFPNIHLETCDEPVASVQATVELETSHIGKGCDRDTYSEKSLHRLCGAAAGTAELLPSPSGSLNWTMGLPTDNGHDSDQVFEFNGTQAVRIPDGVVSVSPKEPFTISVWMRHGPFGRKKETILCSSDKTDMNRHHYSLYVHGCRLIFLFRQDPSEEKKYRPAEFHWKLNQVCDEEWHHYVLNVEFPSVTLYVDGTSHEPFSVTEDYPLHPSKIETQLVVGACWQEFSGVENDNETEPVTVASAGGDLHMTQFFRGNLAGLTLRSGKLADKKVIDCLYTCKEGLDLQVLEDSGRGVQIQAHPSQLVLTLEGEDLGELDKAMQHISYLNSRQFPTPGIRRLKITSTIKCFNEATCISVPPVDGYVMVLQPEEPKISLSGVHHFARAASEFESSEGVFLFPELRIISTITREVEPEGDGAEDPTVQESLVSEEIVHDLDTCEVTVEGEELNHEQESLEVDMARLQQKGIEVSSSELGMTFTGVDTMASYEEVLHLLRYRNWHARSLLDRKFKLICSELNGRYISNEFKVEVNVIHTANPMEHANHMAAQPQFVHPEHRSFVDLSGHNLANPHPFAVVPSTATVVIVVCVSFLVFMIILGVFRIRAAHRRTMRDQDTGKENEMDWDDSALTITVNPMETYEDQHSSEEEEEEEEEEESEDGEEEDDITSAESESSEEEEGEQGDPQNATRQQQLEWDDSTLSY

SEQ ID NO: 37 - protein, 191 aa, Homo sapiens
MGKQNSKLAPEVMEDLVKSTEFNEHELKQWYKGFLKDCPSGRLNLEEFQQLYVKFFPYGDASKFAQHAFRTFDKNGDGTIDFREFICALSITSRGSFEQKLNWAFNMYDLDGDGKITRVEMLEIIEAIYKMVGTVIMMKMNEDGLTPEQRVDKIFSKMDKNKDDQITLDEFKEAAKSDPSIVLLLQCDIQK

SEQ ID NO: 38 - protein, 432 aa, Homo sapiens
MAQALPWLLLWMGAGVLPAHGTQHGIRLPLRSGLGGAPLGLRLPRETDEEPEEPGRRGSFVEMVDNLRGKSGQGYYVEMTVGSPPQTLNILVDTGSSNFAVGAAPHPFLHRYYQRQLSSTYRDLRKGVYVPYTQGKWEGELGTDLLCGAGFPLNQSEVLASVGGSMIIGGIDHSLYTGSLWYTPIRREWYYEVIIVRVEINGQDLKMDCKEYNYDKSIVDSGTTNLRLPKKVFEAAVKSIKAASSTEKFPDGFWLGEQLVCWQAGTTPWNIFPVISLYLMGEVTNQSFRITILPQQYLRPVEDVATSQDDCYKFAISQSSTGTVMGAVIMEGFYVVFDRARKRIGFAVSACHVHDEFRTAAVEGPFVTLDMEDCGYNIPQTDESTLMTIAYVMAAICALFMLPLCLMVCQWRCLRCLRQQHDDFADDISLLK

SEQ ID NO: 39 - protein, 2923 aa, Homo sapiens; identical to SEQ ID NO: 35

SEQ ID NO: 40 - protein, 444 aa, Homo sapiens
MGKGGNQGEGAAEREVSVPTFSWEEIQKHNLRTDRWLVIDRKVYNITKWSIQHPGGQRVIGHYAGEDATDAFRAFHPDLEFVGKFLKPLLIGELAPEEPSQDHGKNSKITEDFRALRKTAEDMNLFKTNHVFFLLLLAHIIALESIAWFTVFYFGNGWIPTLITAFVLATSQAQAGWLQHDYGHLSVYRKPKWNHLVHKFVIGHLKGASANWWNHRHFQHHAKPNIFHKDPDVNMLHVFVLGEWQPIEYGKKKLKYLPYNHQHEYFFLIGPPLLIPMYFQYQIIMTMIVHKNWVDLAWAVSYYIRFFITYIPFYGILGALLFLNFIRFLESHWFVWVTQMNHIVMEIDQEAYRDWFSSQLTATCNVEQSFFNDWFSGHLNFQIEHHLFPTMPRHNLHKIAPLVKSLCAKHGIEYQEKPLLRALLDIIRSLKKSGKLWLDAYLHK

SEQ ID NO: 41 - protein, 960 aa, Homo sapiens
MEDLDQSPLVSSSDSPPRPQPAFKYQFVREPEDEEEEEEEEEEDEDEDLEELEVLERTEFSELEYSEMGSSFSVSPKAESAVIVANPREEIIVKNKDEEEKLVSNNILHNQQELPTALTKLVKEDEVVSSEKAKDSFNEKRVAVEAPMREEYADFKPFERVWEVKDSKEDSDMLAAGGKIESNLESKVDKKCFADSLEQTNHEKDSESSNDDTSFPSTPEGIKDRSGAYITCAPFNPAATESIATNIFPLLGDPTSENKTDEKKIEEKKAQIVTEKNTSTKTSNPFLVAAQDSETDYVTTDNLTKVTEEVVANMPEGLTPDLVQEACESELNEVTGTKIAYETKMDLVQTSEVMQESLYPAAQLCPSFEESEATPSPVLPDIVMEAPLNSAVPSAGASVIQPSSSPLEASSVNYESIKHEPENPPPYEEAMSVSLKKVSGIKEEIKEPENINAALQETEAPYISIACDLIKETKLSAEPAPDFSDYSEMAKVEQPVPDHSELVEDSSPDSEPVDLFSDDSIPDVPQKQDETVMLVKESLTETSFESMIEYENKEKLSALPPEGGKPYLESFKLSLDNTKDTLLPDEVSTLSKKEKIPLQMEELSTAVYSNDDLFISKEAQIRETETFSDSSPIEIIDEFPTLISSKTDSFSKLAREYTDLEVSHKSEIANAPDGAGSLPCTELPHDLSLKNIQPKVEEKISFSDDFSKNGSATSKVLLLPPDVSALATQAEIESIVKPKVLVKEAEKKLPSDTEKEDRSPSAIFSAELSKTSVVDLLYWRDIKKTGVVFGASLFLLLSLTVFSIVSVTAYIALALLSVTISFRIYKGVIQAIQKSDEGHPFRAYLESEVAISEELVQKYSNSALGHVNCTIKELRRLFLVDDLVDSLKFAVLMWVFTYVGALFNGLTLLILALISLFSVPVIYERHQAQIDHYLGLANKNVKDAMAKIQAKIPGLKRKAE

SEQ ID NO: 42 - protein, 675 aa, Homo sapiens
MAAETLLSSLLGLLLLGLLLPASLTGGVGSLNLEELSEMRYGIEILPLPVMGGQSQSSDVVIVSSKYKQRYECRLPAGAIHFQREREEETPAYQGPGIPELLSPMRDAPCLLKTKDWWTYEFCYGRHIQQYHMEDSEIKGEVLYLGYYQSAFDWDDETAKASKQHRLKRYHSQTYGNGSKCDLNGRPREAEVRFLCDEGAGISGDYIDRVDEPLSCSYVLTIRTPRLCPHPLLRPPPSAAPQAILCHPSLQPEEYMAYVQRQAVDSKQYGDKIIEELQDLGPQVWSETKSGVAPQKMAGASPTKDDSKDSDFWKMLNEPEDQAPGGEEVPAEEQDPSPEAADSASGAPNDFQNNVQVKVIRSPADLIRFIEELKGGTKKGKPNIGQEQPVDDAAEVPQREPEKERGDPERQREMEEEEDEDEDEDEDEDERQLLGEFEKELEGILLPSDRDRLRSEVKAGMERELENIIQEASPALPPTEKELDPDGLKKESERDRAMLALTSTLNKLIKRLEEKQSPELVKKHKKKRVVPKKPPPSPQPTEEDPEHRVRVRVTKLRLGGPNQDLTVLEMKRENPQLKQIEGLVKELLEREGLTAAGKIEIKIVRPWAEGTEEGARWLTDEDTRNLKEIFFNILVPGAEEAQKERQRQKELESNYRRVWGSPGGEGTGDLDEFDF

SEQ ID NO: 43 - protein, 1107 aa, Homo sapiens [sequence omitted]

SEQ ID NO: 44 - protein, 1070 aa, Homo sapiens
MGAARGSPARPRRLPLLSVLLLPLLGGTQTAIVFIKQPSSQDALQGRRALLRCEVEAPGPVHVYWLLDGAPVQDTERRFAQGSSLSFAAVDRLQDSGTFQCVARDDVTGEEARSANASFNIKWIEAGPVVLKHPASEAEIQPQTQVTLRCHIDGHPRPTYQWFRDGTPLSDGQSNHTVSSKERNLTLRPAGPEHSGLYSCCAHSAFGQACSSQNFTLSIADESFARVVLAPQDVVVARYEEAMFHCQFSAQPPPSLQWLFEDETPITNRSRPPHLRRATVFANGSLLLTQVRPRNAGIYRCIGQGQRGPPIILEATLHLAEIEDMPLFEPRVFTAGSEERVTCLPPKGLPEPSVWWEHAGVRLPTHGRVYQKGHELVLANIAESDAGVYTCHAANLAGQRRQDVNITVATVPSWLKKPQDSQLEEGKPGYLDCLTQATPKPTVVWYRNQMLISEDSRFEVFKNGTLRINSVEVYDGTWYRCMSSTPAGSIEAQARVQVLEKLKFTPPPQPQQCMEFDKEATVPCSATGREKPTIKWERADGSSLPEWVTDNAGTLHFARVTRDDAGNYTCIASNGPQGQIRAHVQLTVAVFITFKVEPERTTVYQGHTALLQCEAQGDPKPLIQWKGKDRILDPTKLGPRMHIFQNGSLVIHDVAPEDSGRYTCIAGNSCNIKHTEAPLYVVDKPVPEESEGPGSPPPYKMIQTIGLSVGAAVAYIIAVLGLMFYCKKRCKAKRLQKQPEGEEPEMECLNGGPLQNGQPSAEIQEEVALTSLGSGPAATNKRHSTSDKMHFPRSSLQPITTLGKSEFGEVFLAKAQGLEEGVAETLVLVKSLQSKDEQQQLDFRRELEMFGKLNHANVVRLLGLCREAEPHYMVLEYVDLGDLKQFLRISKSKDEKLKSQPLSTKQKVALCTQVALGMEHLSNNRFVHKDLAARNCLVSAQRQVKVSALGLSKDVYNSEYYHFRQAWVPLRWMSPEAILEGDFSTKSDVWAFGVLMWEVFTHGEMPHGGQADDEVLADLQAGKARLPQPEGCPSKLYRLMQRCWALSPKDRPSFSEIASALGDSTVDSKP

SEQ ID NO: 45 - protein, 1555 aa, Homo sapiens
MGCKGDASGACAAGALPVTGVCYKMGVLVVLTVLWLFSSVKADSKAITTSLTTKWFSTPLLLEASEFLAEDSQEKFWNFVEASQNIGSSDHDGTDYSYYHAILEAAFQFLSPLQQNLFKFCLSLRSYSATIQAFQQIAADEPPPEGCNSFFSVHGKKTCESDTLEALLLTASERPKPLLFKGDHRYPSSNPESPVVIFYSEIGSEEFSNFHRQLISKSNAGKINYVFRHYIFNPRKEPVYLSGYGVELAIKSTEYKAKDDTQVKGTEVNTTVIGENDPIDEVQGFLFGKLRDLHPDLEGQLKELRKHLVESTNEMAPLKVWQLQDLSFQTAARILASPVELALVVMKDLSQNFPTKARAITKTAVSSELRTEVEENQKYFKGTLGLQPGDSALFINGLHMDLDTQDIFSLFDVLRNEARVMEGLHRLGIEGLSLHNVLKLNIQPSEADYAVDIRSPAISWVNNLEVDSRYNSWPSSLQELLRPTFPGVIRQIRKNLHNMVFIVDPAHETTAELMNTAEMFLSNHIPLRIGFIFVVNDSEDVDGMQDAGVAVLRAYNYVAQEVDDYHAFQTLTHIYNKVRTGEKVKVEHVVSVLEKKYPYVEVNSILGIDSAYDRNRKEARGYYEQTGVGPLPVVLFNGMPFEREQLDPDELETITMHKILETTTFFQRAVYLGELPHDQDVVEYIMNQPNVVPRINSRILTAERDYLDLTASNNFFVDDYARFTILDSQGKTAAVANSMNYLTKKGMSSKEIYDDSFIRPVTFWIVGDFDSPSGRQLLYDAIKHQKSSNNVRISMINNPAKEISYENTQISRAIWAALQTQTSNAAKNFITKMAKEGAAEALAAGADIAEFSVGGMDFSLFKEVFESSKMDFILSHAVYCRDVLKLKKGQRAVISNGRIIGPLEDSELFNQDDFHLLENIILKTSGQKIKSHIQQLRVEEDVASDLVMKVDALLSAQPKGDPRIEYQFFEDRHSAIKLRPKEGETYFDVVAVVDPVTREAQRLAPLLLVLAQLINMNLRVFMNCQSKLSDMPLKSFYRYVLEPEISFTSDNSFAKGPIAKFLDMPQSPLFTLNLNTPESWMVESVRTPYDLDNIYLEEVDSVVAAEYELEYLLLEGHCYDITTGQPPRGLQFTLGTSANPVIVDTIVMANLGYFQLKANPGAWILRLRKGRSEDIYRIYSHDGTDSPPDADEVVIVLNNFKSKIIKVKVQKKADMVNEDLLSDGTSENESGFWDSFKWGFTGQKTEEVKQDKDDIINIFSVASGHLYERFLRIMMLSVLKNTKTPVKFWFLKNYLSPTFKEFIPYMANEYNFQYELVQYKWPRWLHQQTEKQRIIWGYKILFLDVLFPLVVDKFLFVDADQIVRTDLKELRDFNLDGAPYGYTPFCDSRREMDGYRFWKSGYWASHLAGRKYHISALYVVDLKKFRKIAAGDRLRGQYQGLSQDPNSLSNLDQDLPNNMIHQVPIKSLPQEWLWCETWCDDASKKRAKTIDLCNNPMTKEPKLEAAVRIVPEWQDYDQEIKQLQIRFQKEKETGALYKEKTKEPSREGPQKREEL

SEQ ID NO: 46 - protein, 781 aa, Homo sapiens
MATQADLMELDMAMEPDRKAAVSHWQQQSYLDSGIHSGATTTAPSLSGKGNPEEEDVDTSQVLYEWEQGFSQSFTQEQVADIDGQYAMTRAQRVRAAMFPETLDEGMQIPSTQFDAAHPTNVQRLAEPSQMLKHAVVNLINYQDDAELATRAIPELTKLLNDEDQVVVNKAAVMVHQLSKKEASRHAIMRSPQMVSAIVRTMQNTNDVETARCTAGTLHNLSHHREGLLAIFKSGGIPALVKMLGSPVDSVLFYAITTLHNLLLHQEGAKMAVRLAGGLQKMVALLNKTNVKFLAITTDCLQILAYGNQESKLIILASGGPQALVNIMRTYTYEKLLWTTSRVLKVLSVCSSNKPAIVEAGGMQALGLHLTDPSQRLVQNCLWTLRNLSDAATKQEGMEGLLGTLVQLLGSDDINVVTCAAGILSNLTCNNYKNKMMVCQVGGIEALVRTVLRAGDREDITEPAICALRHLTSRHQEAEMAQNAVRLHYGLPVVVKLLHPPSHWPLIKATVGLIRNLALCPANHAPLREQGAIPRLVQLLVRAHQDTQRRTSMGGTQQQFVEGVRMEEIVEGCTGALHILARDVHNRIVIRGLNTIPLFVQLLYSPIENIQRVAAGVLCELAQDKEAAEAIEAEGATAPLTELLHSRNEGVATYAAAVLFRMSEDKPQDYKKRLSVELTSSLFRTEPMAWNETADLGLDIGAQGEPLGYRQDDPSYRSFHSGGYGQDALGMDPMMEHEMGGHHPGADYPVDGLPDLGHAQDLMDGLPPGDSNQLAWFDTDL

SEQ ID NO: 47 - protein, 931 aa, Homo sapiens [sequence omitted]

SEQ ID NO: 48 - protein, 953 aa, Homo sapiens
MTSATSPIILKWDPKSLEIRTLTVERLLEPLVTQVTTLVNTSNKGPSGKKKGRSKKAHVLAASVEQATQNFLEKGEQIAKESQDLKEELVAAVEDVRKQGETMRIASSEFADDPCSSVKRGTMVRAARALLSAVTRLLILADMADVMRLLSHLKIVEEALEAVKNATNEQDLANRFKEFGKKMVKLNYVAARRQQELKDPHCRDEMAAARGALKKNATMLYTASQAFLRHPDVAATRANRDYVFKQVQEAIAGISNAAQATSPTDEAKGHTGIGELAAALNEFDNKIILDPMTFSEARFRPSLEERLESIISGAALMADSSCTRDDRRERIVAECNAVRQALQDLLSEYMNNTGRKEKGDPLNIAIDKMTKKTRDLRRQLRKAVMDHISDSFLETNVPLLVLIEAAKSGNEKEVKEYAQVFREHANKLVEVANLACSISNNEEGVKLVRMAATQIDSLCPQVINAALTLAARPQSKVAQDNMDVFKDQWEKQVRVLTEAVDDITSVDDFLSVSENHILEDVNKCVIALQEGDVDTLDRTAGAIRGRAARVIHIINAEMENYEAGVYTEKVLEATKLLSETVMPRFAEQVEVAIEALSANVPQPFEENEFIDASRLVYDGVRDIRKAVLMIRTPEELEDDSDFEQEDYDVRRGTSVQTEDDQLIAGQSARAIMAQLPQEEKAKIAEQVEIFHQEKSKLDAEVAKWDDSGNDIIVLAKQMCMIMMEMTDFTRGKGPLKNTSDVINAAKKIAEAGSRMDKLARAVADQCPDSACKQDLLAYLQRIALYCHQLNICSKVKAEVQNLGGELIVSGTGVQSTFTTFYEVDCDVIDGGRASQLSTHLPTCAEGAPIGSGSSDSSMLDSATSLIQAAKNLMNAVVLTVKASYVASTKYQKVYGTAAVNSPVVSWKMKAPEKKPLVKREKPEEFQTRVRRGSQKKHISPVQALSEFKAMDSF

SEQ ID NO: 49 - protein, 962 aa, Homo sapiens
MDDSEVESTASILASVKEQEAQFEKLTRALEEERRHVSAQLERVRVSPQDANPLMANGTLTRRHQNGRFVGDADLERQKFSDLKLNGPQDHSHLLYSTIPRMQEPGQIVETYTEEDPEGAMSVVSVETSDDGTTRRTETTVKKVVKTVTTRTVQPVAMGPDGLPVDASSVSNNYIQTLGRDFRKNGNGGPGPYVGQAGTATLPRNFHYPPDGYSRHYEDGYPGGSDNYGSLSRVTRIEERYRPSMEGYRAPSRQDVYGPQPQVRVGGSSVDLHRFHPEPYGLEDDQRSMGYDDLDYGMMSDYGTARRTGTPSDPRRRLRSYEDMIGEEVPSDQYYWAPLAQHERGSLASLDSLRKGGPPPPNWRQPELPEVIAMLGFRLDAVKSNAAAYLQHLCYRNDKVKTDVRKLKGIPVLVGLLDHPKKEVHLGACGALKNISFGRDQDNKIAIKNCDGVPALVRLLRKARDMDLTEVITGTLWNLSSHDSIKMEIVDHALHALTDEVIIPHSGWEREPNEDCKPRHIEWESVLTNTAGCLRNVSSERSEARRKLRECDGLVDALIFIVQAEIGQKDSDSKLVENCVCLLRNLSYQVHREIPQAERYQEAAPNVANNTGPHAASCFGAKKGKGKKPIEDPANDTVDFPKRTSPARGYELLFQPEVVRIYISLLKESKTPAILEASAGAIQNLCAGRWTYGRYIRSALRQEKALSAIADLLTNEHERVVKAASGALRNLAVDARNKELIGKHAIPNLVKNLPGGQQNSSWNFSEDTVISILNTINEVIAENLEAAKKLRETQGIEKLVLINKSGNRSEKEVRAAALVLQTIWGYKELRKPLEKEGWKKSDFQVNLNNASRSQSSHSYDDSTLPLIDRNQKSDKKPDREEIQMSNMGSNTKSLDNNYSTPNERGDHNRTLDRSGDLGDMEPLKGTTPLMQDEGQESLEEELDVLVLDDEGGQVSYPSMQKI

SEQ ID NO: 50 - protein, 906 aa, Homo sapiens
MCRIAGALRTLLPLLLALLQASVEASGEIALCKTGFPEDVYSAVLSKDVHEGQPLLNVKFSNCNGKRKVQYESSEPADFKVDEDGMVYAVRSFPLSSEHAKFLIYAQDKETQEKWQVAVKLSLKPTLTEESVKESAEVEEIVFPRQFSKHSGHLQRQKRDWVIPPINLPENSRGPFPQELVRIRSDRDKNLSLRYSVTGPGADQPPTGIFIINPISGQLSVTKPLDREQIARFHLRAHAVDINGNQVENPIDIVINVIDMNDNRPEFLHQVWNGTVPEGSKPGTYVMTVTAIDADDPNALNGMLRYRIVSQAPSTPSPNMFTINNETGDIITVAAGLDREKVQQYTLIIQATDMEGNPTYGLSNTATAVITVTDVNDNPPEFTAMTFYGEVPENRVDIIVANLTVTDKDQPHTPAWNAVYRISGGDPTGRFAIQTDPNSNDGLVTVVKPIDFETNRMFVLTVAAENQVPLAKGIQHPPQSTATVSVTVIDVNENPYFAPNPKIIRQEEGLHAGTMLTTFTAQDPDRYMQQNIRYTKLSDPANWLKIDPVNGQITTIAVLDRESPNVKNNIYNATFLASDNGIPPMSGTGTLQIYLLDINDNAPQVLPQEAETCETPDPNSINITALDYDIDPNAGPFAFDLPLSPVTIKRNWTITRLNGDFAQLNLKIKFLEAGIYEVPIIITDSGNPPKSNISILRVKVCQCDSNGDCTDVDRIVGAGLGTGAIIAILLCIIILLILVLMFVVWMKRRDKERQAKQLLIDPEDDVRDNILKYDEEGGGEEDQDYDLSQLQQPDTVEPDAIKPVGIRRMDERPIHAEPQYPVRSAAPHPGDIGDFINEGLKAADNDPTAPPYDSLLVFDYEGSGSTAGSLSSLNSSSSGGEQDYDYLNDWGPRFKKLADMYGGGDD

SEQ ID NO: 51 - protein, 3460 aa, Homo sapiens [sequence omitted]

SEQ ID NO: 52 - protein, 2214 aa, Homo sapiens; identical to SEQ ID NO: 25

SEQ ID NO: 53 - protein, 179 aa, Homo sapiens; identical to SEQ ID NO: 26

SEQ ID NO: 54 - protein, 641 aa, Homo sapiens
HLPKQQRGGVCLGVKSKWQPKLRTGREKIINMHFQAFWLCLGLLFISINAEFMDDDVETEDFEENSEEIDVNESELSSEIKYKTPQPIGEVYFAETFDSGRLAGWVLSKAKKDDMDEEISIYDGRWEIEELKENQVPGDRGLVLKSRAKHHAISAVLAKPFIFADKPLIVQYEVNFQDGIDCGGAYIKLLADTDDLILENFYDKTSYIIMFGPDKCGEDYKLHFIFRHKHPKTGVFEEKHAKPPDVDLKKFFTDRKTHLYTLVMNPDDTFEVLVDQTVVNKGSLLEDVVPPIKPPKEIEDPNDKKPEEWDERAKIPDPSAVKPEDWDESEPAQIEDSSVVKPAGWLDDEPKFIPDPNAEKPDDWNEDTDGEWEAPQILNPACRIGCGEWKPPMIDNPKYKGVWRPPLVDNPNYQGIWSPRKIPNPDYFEDDHPFLLTSFSALGLELWSMTSDIYFDNFIICSEKEVADHWAADGWRWKIMIANANKPGVLKQLMAAAEGHPWLWLIYLVTAGVPIALITSFCWPRKVKKKHKDTEYKKTDICIPQTKGVLEQEEKEEKAALEKPMDLEEEKKQNDGEMLEKEEESEPEEKSEEEIEIIEGQEESNQSNKSGSEDEMKEADESTGSGDGPIKSVRKRRVRKD

SEQ ID NO: 55 - protein, 431 aa, Homo sapiens
MSWVQATLLARGLCRAWGGTCGAALTGTSISQVPRRLPRGLHCSAAAHSSEQSLVPSPPEPRQRPTKALVPFEDLFGQAPGGERDKASFLQTVQKFAEHSVRKRGHIDFIYLALRKMREYGVERDLAVYNQLLNIFPKEVFRPRNIIQRIFVHYPRQQECGIAVLEQMENHGVMPNKETEFLLIQIFGRKSYPMLKLVRLKLWFPRFMNVNPFPVPRDLPQDPVELAMFGLRHMEPDLSARVTIYQVPLPKDSTGAADPPQPHIVGIQSPDQQAALARHNPARPVFVEGPFSLWLRNKCVYYHILRADLLPPEEREVEETPEEWNLYYPMQLDLEYVRSGWDNYEFDINEVEEGPVFAMCMAGAHDQATMAKWIQGLQETNPTLAQIPVVFRLAGSTRELQTSSAGLEEPPLPEDHQEEDDNLQRQQQGQS

SEQ ID NO: 56 - protein, 579 aa, Homo sapiens
MPSASCDTLLDDIEDIVSQEDSKPQDRHFVRKDVVPKVRRRNTQKYLQEEENSPPSDSTIPGIQKIWIRTWGCSHNNSDGEYMAGQLAAYGYKITENASDADLWLLNSCTVKNPAEDHFRNSIKKAQEENKKIVLAGCVPQAQPRQDYLKGLSIIGVQQIDRVVEVVEETIKGHSVRLLGQKKDNGRRLGGARLDLPKIRKNPLIEIISISTGCLNACTYCKTKHARGNLASYPIDELVDRAKQSFQEGVCEIWLTSEDTGAYGRDIGTNLPTLLWKLVEVIPEGAMLRLGMTNPPYILEHLEEMAKILNHPRVYAFLHIPVQSASDSVLMEMKREYCVADFKRVVDFLKEKVPGITIATDIICGFPGETDQDFQETVKLVEEYKFPSLFINQFYPRPGTPAAKMEQVPAQVKKQRTKDLSRVFHSYSPYDHKIGERQQVLVTEESFDSKFYVAHNQFYEQVLVPKNPAFMGKMVEVDIYESGKHFMKGQPVSDAKVYTPSISKPLAKGEVSGLTKDFRNGLGNQLSSGSHTSAASQCDSASSRMVLPMPRLHQDCALRMSVGLALLGLLFAFFVKVYN

SEQ ID NO: 57 - protein, 993 aa, Homo sapiens
MAAEWASRFWLWATLLIPAAAVYEDQVGKFDWRQQYVGKVKFASLEFSPGSKKLVVATEKNVIAALNSRTGEILWRHVDKGTAEGAVDAMLLHGQDVITVSNGGRIMRSWETNIGGLNWEITLDSGSFQALGLVGLQESVRYIAVLKKTTLALHHLSSGHLKWVEHLPESDSIHYQMVYSYGSGVVWALGVVPFSHVNIVKFNVEDGEIVQQVRVSTPWLQHLSGACGVVDEAVLVCPDPSSRSLQTLALETEWELRQIPLQSLDLEFGSGFQPRVLPTQPNPVDASRAQFFLHLSPSHYALLQYHYGTLSLLKNFPQTALVSFATTGEKTVAAVMACRNEVQKSSSSEDGSMGSFSEKSSSKDSLACFNQTYTINLYLVETGRRLLDTTITFSLEQSGTRPERLYIQVFLKKDDSVGYRALVQTEDHLLLFLQQLAGKVVLWSREESLAEVVCLEMVDLPLTGAQAELEGEFGKKADGLLGMFLKRLSSQLILLQAWTSHLWKMFYDARKPRSQIKNEINIDTLARDEFNLQKMMVMVTASGKLFGIESSSGTILWKQYLPNVKPDSSFKLMVQRTTAHFPHPPQCTLLVKDKESGMSSLYVFNPIFGKWSQVAPPVLKRPILQSLLLPVMDQDYAKVLLLIDDEYKVTAFPATRNVLRQLHELAPSIFFYLVDAEQGRLCGYRLRKDLTTELSWELTIPPEVQRIVKVKGKRSSEHVHSQGRVMGDRSVLYKSLNPNLLAVVTESTDAHHERTFIGIFLIDGVTGRIIHSSVQKKAKGPVHIVHSENWVVYQYWNTKARRNEFTVLELYEGTEQYNATAFSSLDRPQLPQVLQQSYIFPSSISAMEATITERGITSRHLLIGLPSGAILSLPKALLDPRRPEIPTEQSREENLIPYSPDVQIHAERFINYNQTVSRMRGIYTAPSGLESTCLVVAYGLDIYQTRVYPSKQFDVLKDDYDYVLISSVLFGLVFATMITKRLAQVKLLNRAWR

SEQ ID NO: 58 - protein, 253 aa, Homo sapiens
MASGSNWLSGVNVVLVMAYGSLVFVLLFIFVKRQIMRFAMKSRRGPHVPVGHNAPKDLKEEIDIRLSRVQDIKYEPQLLADDDARLLQLETQGNQSCYNYLYRMKALDAIRTSEIPFHSEGRHPRSLMGKNFRSYLLDLRNTSTPFKGVRKALIDTLLDGYETARYGTGVFGQNEYLRYQEALSELATAVKARIGSSQRHHQSAAKDLTQSPEVSPTTIQVTYLPSSQKSKRAKHFLELKSFKDNYNTLESTL

SEQ ID NO: 59 - protein, 215 aa, Homo sapiens
MSSSEEVSWISWFCGLRGNEFFCEVDEDYIQDKFNLTGLNEQVPHYRQALDMILDLEPDEELEDNPNQSDLIEQAAEMLYGLIHARYILTNRGIAQMLEKYQQGDFGYCPRVYCENQPMLPIGLSDIPGEAMVKLYCPKCMDVYTPKSSRHHHTDGAYFGTGFPHMLFMVHPEYRPKRPANQFVPRLYGFKIHPMAYQLQLQAASNFKSPVKTIR

SEQ ID NO: 60 - protein, 201 aa, Homo sapiens
MAATALLEAGLARVLFYPTLLYTLFRGKVPGRAHRDWYHRIDPTVLLGALPLRSLTRQLVQDENVRGVITMNEEYETRFLCNSSQEWKRLGVEQLRLSTVDMTGIPTLDNLQKGVQFALKYQSLGQCVYVHCKAGRSRSATMVAAYLIQVHKWSPEEAVRAIAKIRSYIHIRPGQLDVLKEFHKQITARATKDGTFVISKT

SEQ ID NO: 61 - protein, 705 aa, Homo sapiens
MTKFGFLRLSYEKQDTLLKLLILSMAAVLSFSTRLFAVLRFESVIHEFDPYFNYRTTRFLAEEGFYKFHNWFDDRAWYPLGRIIGGTIYPGLMITSAAIYHVLHFFHITIDIRNVCVFLAPLFSSFTTIVTYHLTKELKDAGAGLLAAAMIAVVPGYISRSVAGSYDNEGIAIFCMLLTYYMWIKAVKTGSICWAAKCALAYFYMVSSWGGYVFLINLIPLHVLVLMLTGRFSHRIYVAYCTVYCLGTILSMQISFVGFQPVLSSEHMAAFGVFGLCQIHAFVDYLRSKLNPQQFEVLFRSVISLVGFVLLTVGALLMLTGKISPWTGRFYSLLDPSYAKNNIPIIASVSEHQPTTWSSYYFDLQLLVFMFPVGLYYCFSNLSDARIFIIMYGVTSMYFSAVMVRLMLVLAPVMCILSGIGVSQVLSTYMKNLDISRPDKKSKKQQDSTYPIKNEVASGMILVMAFFLITYTFHSTWVTSEAYSSPSIVLSARGGDGSRIIFDDFREAYYWLRHNTPEDAKVMSWWDYGYQITAMANRTILVDNNTWNNTHISRVGQAMASTEEKAYEIMRELDVSYVLVIFGGLTGYSSDDINKFLWMVRIGGSTDTGKHIKENDYYTPTGEFRVDREGSPVLLNCLMYKMCYYRFGQVYTEAKRPPGFDRVRNAEIGNKDFELDVLEEAYTTEHWLVRIYKVKDLDNRGLSRT

SEQ ID NO: 62 - protein, 489 aa, Homo sapiens
MGSGPLSLPLALSPPRLLLLLLLSLLPVARASEAEHRLFERLFEDYNEIIRPVANVSDPVIIHFEVSMSQLVKVDEVNQIMETNLWLKQIWNDYKLKWNPSDYGGAEFMRVPAQKIWKPDIVLYNNAVGDFQVDDKTKALLKYTGEVTWIPPAIFKSSCKIDVTYFPFDYQNCTMKFGSWSYDKAKIDLVLIGSSMNLKDYWESGEWAIIKAPGYKHDIKYNCCEEIYPDITYSLYIRRLPLFYTINLIIPCLLISFLTVLVFYLPSDCGEKVTLCISVLLSLTVFLLVITETIPSTSLVIPLIGEYLLFTMIFVTLSIVITVFVLNVHYRTPTTHTMPSWVKTVFLNLLPRVMFMTRPTSNEGNAQKPRPLYGAELSNLNCFSRAESKGCKEGYPCQDGMCGYCHHRRIKISNFSANLTRSSSSESVDAVLSLSALSPEIKEAIQSVKYIAENMKAQNEAKEEQKAQEIQQLKRKEKSTETSDQEPGL

SEQ ID NO: 63 - protein, 1241 aa, Homo sapiens
MSSAPRRPAKGADSFCTPEPESLGPGTPGFPEQEEDELHRTLGVERFEEILQEAGSRGGEEPGRSYGEEDFEYHRQSSHHIHHPLSTHLPPDARRRKTPQGPGRKPRRRPGASPTGETPTIEEGEEDEDEASEAEGARALTQPSPVSTPSSVQFFLREDDSADRKAERTSPSSPAPLPHQEATPRASKGAQAGTQVEEAEAEAVAVASGTAGGDDGGASGRPLPKAQPGHRSYNLQERRRIGSMTGAEQALLPRVPTDEIEAQTLATADLDLMKSHRFEDVPGVRRHLVRKNAKGSTQSGREGREPGPTPRARPRAPHKPHEVFVELNELLLDKNQEPQWRETARWIKFEEDVEEETERWGKPHVASLSFRSLLELRRTLAHGAVLLDLDQQTLPGVAHQVVEQMVISDQIKAEDRANVLRALLLKHSHPSDEKDFSFPRNISAGSLGSLLGHHHGQGAESDPHVTEPLMGGVPETRLEVERERDVPPPAPPAGITRSKSKHELKLLEKIPENAEATVVLVGCVEFLSRPTMAFVRLREAVELDAVLEVPVPVRFLFLLLGPSSANMDYHEIGRSISTLMSDKQFHEAAYLADEREDLLTAINAFLDCSVVLPPSEVQGEELLRSVAHFQRQMLKKREEQGRLLPTGAGLEPKSAQDKALLQMVEAAGAAEDDPLRRTGRPFGGLIRDVRRRYPHYLSDFRDALDPQCLAAVIFIYFAALSPAITFGGLLGEKTQDLIGVSELIMSTALQGVVFCLLGAQPLLVIGFSGPLLVFEEAFFSFCSSNHLEYLVGRVWIGFWLVFLALLMVALEGSFLVRFVSRFTQEIFAFLISLIFIYETFYKLVKIFQEHPLHGCSASNSSEVDGGENMTWAGARPTLGPGNRSLAGQSGQGKPRGQPNTALLSLVLMAGTFFIAFFLRKFKNSRFFPGRIRRVIGDFGVPIAILIMVLVDYSIEDTYTQKLSVPSGFSVTAPEKRGWVINPLGEKSPFPVWMMVASLLPAILVFILIFMETQITTLIISKKERMLQKGSGFHLDLLLIVAMGGICALFGLPWLAAATVRSVTHANALTVMSKAVAPGDKPKIQEVKEQRVTGLLVALLVGLSIVIGDLLRQIPLAVLFGIFLYMGVTSLNGIQFYERLHLLLMPPKHHPDVTYVKKVRTLRMHLFTALQLLCLALLWAVMSTAASLAFPFILILTVPLRMVVLTRIFTDREMKCLDANEAEPVFDEREGVDEYNEMPMPV

SEQ ID NO: 64 - protein, 444 aa, Homo sapiens; identical to SEQ ID NO: 40

SEQ ID NO: 65 - protein, 249 aa, Homo sapiens
MSLEDPFFVVRGEVQKAVNTARGLYQRWCELLQESAAVGREELDWTTNELRNGLRSIEWDLEDLEETIGIVEANPGKFKLPAGDLQERKVFVERMREAVQEMKDHMVSPTAVAFLERNNREILAGKPAAQKSPSDLLDASAVSATSRYIEEQQATQQLIMDEQDQQLEMVSGSIQVLKHMSGRVGEELDEQGIMLDAFAQEMDHTQSRMDGVLRKLAKVSHMTSDRRQWCAIAVLVGVLLLVLILLFSL

SEQ ID NO: 66 - protein, 448 aa, Homo sapiens
MLTFMASDSEEEVCDERTSLMSAESPTPRSCQEGRQGPEDGENTAQWRSQENEEDGEEDPDRYVCSGVPGRPPGLEEELTLKYGAKHVIMLFVPVTLCMIVVVATIKSVRFYTEKNGQLIYTPFTEDTPSVGQRLLNSVLNTLIMISVIVVMTIFLVVLYKYRCYKFIHGWLIMSSLMLLFLFTYIYLGEVLKTYNVAMDYPTLLLTVWNFGAVGMVCIHWKGPLVLQQAYLIMISALMALVFIKYLPEWSAWVILGAISVYDLVAVLCPKGPLRMLVETAQERNEPIFPALIYSSAMVWTVGMAKLDPSSQGALQLPYDPEMEEDSYDSFGEPSYPEVFEPPLTGYPGEELEEEEERGVKLGLGDFIFYSVLVGKAAATGSGDWNTTLACFVAILIGLCLTLLLLAVFKKALPALPISITFGLIFYFSTDNLVRPFMDTLASHQLYI

SEQ ID NO: 67 - protein, 890 aa, Homo sapiens
MDSNTAPLGPSCPQPPPAPQPQARSRLNATASLEQERSERPRAPGPQAGPGPGVRDAAAPAEPQAQHTRSRERADGTGPTKGDMEIPFEEVLERAKAGDPKAQTEVGKHYLQLAGDTDEELNSCTAVDWLVLAAKQGRREAVKLLRRCLADRRGITSENEREVRQLSSETDLERAVRKAALVMYWKLNPKKKKQVAVAELLENVGQVNEHDGGAQPGPVPKSLQKQRRMLERLVSSESKNYIALDDFVEITKKYAKGVIPSSLFLQDDEDDDELAGKSPEDLPLRLKVVKYPLHAIMEIKEYLIDMASRAGMHWLSTIIPTHHINALIFFFIISNLTIDFFAFFIPLVIFYLSFISMVICTLKVFQDSKAWENFRTLTDLLLRFEPNLDVEQAEVNFGWNHLEPYAHFLLSVFFVIFSFPIASKDCIPCSELAVITGFFTVTSYLSLSTHAEPYTRRALATEVTAGLLSLLPSMPLNWPYLKVLGQTFITVPVGHLVVLNVSVPCLLYVYLLYLFFRMAQLRNFKGTYCYLVPYLVCFMWCELSVVILLESTGLGLLRASIGYFLFLFALPILVAGLALVGVLQFARWFTSLELTKIAVTVAVCSVPLLLRWWTKASFSVVGMVKSLTRSSMVKLILVWLTAIVLFCWFYVYRSEGMKVYNSTLTWQQYGALCGPRAWKETNMARTQILCSHLEGHRVTWTGRFKYVRVTDIDNSAESAINMLPFFIGDWMRCLYGEAYPACSPGNTSTAEEELCRLKLLAKHPCHIKKFDRYKFEITVGMPFSSGADGSRSREEDDVTKDIVLRASSEFKSVLLSLRQGSLIEFSTILEGRLGSKWPVFELKAISCLNCMAQLSPTRRHVKIEHDWRSTVHGAVKFAFDFFFFPFLSAA

SEQ ID NO: 68 - protein, 501 aa, Homo sapiens
MAQALPWLLLWMGAGVLPAHGTQHGIRLPLRSGLGGAPLGLRLPRETDEEPEEPGRRGSFVEMVDNLRGKSGQGYYVEMTVGSPPQTLNILVDTGSSNFAVGAAPHPFLHRYYQRQLSSTYRDLRKGVYVPYTQGKWEGELGTDLVSIPHGPNVTVRANIAAITESDKFFINGSNWEGILGLAYAEIARPDDSLEPFFDSLVKQTHVPNLFSLQLCGAGFPLNQSEVLASVGGSMIIGGIDHSLYTGSLWYTPIRREWYYEVIIVRVEINGQDLKMDCKEYNYDKSIVDSGTTNLRLPKKVFEAAVKSIKAASSTEKFPDGFWLGEQLVCWQAGTTPWNIFPVISLYLMGEVTNQSFRITILPQQYLRPVEDVATSQDDCYKFAISQSSTGTVMGAVIMEGFYVVFDRARKRIGFAVSACHVHDEFRTAAVEGPFVTLDMEDCGYNIPQTDESTLMTIAYVMAAICALFMLPLCLMVCQWRCLRCLRQQHDDFADDISLLK

SEQ ID NO: 69 - protein, 305 aa, Homo sapiens
MELHYLAKKSNQADLCDARDWSSRGLPGDQADTAATRAALCCQKQCASTPRATEMEGSKLSSSPASPSSSLQNSTLQPDAFPPGLLHSGNNQITAERKVCNCCSQELETSFTYVDKNINLEQRNRSSPSAKGHNHPGELGWENPNEWSQEAAISLISEEEDDTSSEATSSGKSIDYGFISAILFLVTGILLVIISYIVPREVTVDPNTVAAREMERLEKESARLGAHLDRCVIAGLCLLTLGGVILSCLLMMSMWKGELYRRNRFASSKESAKLYGSFNFRMKTSTNENTLELSLVEEDALAVQS

SEQ ID NO: 70 - protein, 416 aa, Homo sapiens
MSEADGLRQRRPLRPQVVTDDDGQAPEAKDGSSFSGRVFRVTFLMLAVSLTVPLLGAMMLLESPIDPQPLSFKEPPLLLGVLHPNTKLRQAERLFENQLVGPESIAHIGDVMFTGTADGRVVKLENGEIETIARFGSGPCKTRDDEPVCGRPLGIRAGPNGTLFVADAYKGLFEVNPWKREVKLLLSSETPIEGKNMSFVNDLTVTQDGRKIYFTDSSSKWQRRDYLLLVMEGTDDGRLLEYDTVTREVKVLLDQLRFPNGVQLSPAEDFVLVAETTMARIRRVYVSGLMKGGADLFVENMPGFPDNIRPSSSGGYWVGMSTIRPNPGFSMLDFLSERPWIKRMIFKLFSQETVMKFVPRYSLVLELSDSGAFRRSLHDPDGLVATYISEVHEHDGHLYLGSFRSPFLCRLSLQAV

SEQ ID NO: 71 - protein, 244 aa, Homo sapiens
MAPRPLGPLVLALGGAAAVLGSVLFILWKTYFGRGRERRWDRGEAWWGAEAARLPEWDEWDPEDEEDEEPALEELEQREVLVLGLDGAGKSTFLRVLSGKPPLEGHIPTWGFNSVRLPTKDFEVDLLEIGGSQNLRFYWKEFVSEVDVLVFVVDSADRLRLPWARQELHKLLDKDPDLPVVVVANKQDLSEAMSMGELQRELGLQAIDNQREVFLLAASIAPAGPTFEEPGTVHIWKLLLELLS

SEQ ID NO: 72 - protein, 455 aa, Homo sapiens
MSFLIDSSIMITSQILFFGFGWLFFMRQLFKDYEIRQYVVQVIFSVTFAFSCTMFELIIFEILGVLNSSSRYFHWKMNLCVILLILVFMVPFYIGYFIVSNIRLLHKQRLLFSCLLWLTFMYFFWKLGDPFPILSPKHGILSIEQLISRVGVIGVTLMALLSGFGAVNCPYTYMSYFLRNVTDTDILALERRLLQTMDMIISKKKRMAMARRTMFQKGEVHNKPSGFWGMIKSVTTSASGSENLTLIQQEVDALEELSRQLFLETADLYATKERIEYSKTFKGKYFNFLGYFFSIYCVWKIFMATINIVFDRVGKTDPVTRGIEITVNYLGIQFDVKFWSQHISFILVGIIIVTSIRGLLITLTKFFYAISSSKSSNVIVLLLAQIMGMYFVSSVLLIRMSMPLEYRTIITEVLGELQFNFYHRWFDVIFLVSALSSILFLYLAHKQAPEKQMAP

SEQ ID NO: 73 - protein, 903 aa, Homo sapiens
MSDSGSQLGSMGSLTMKSQLQITVISAKLKENKKNWFGPSPYVEVTVDGQSKKTEKCNNTNSPKWKQPLTVIVTPVSKLHFRVWSHQTLKSDVLLGTAALDIYETLKSNNMKLEEVVVTLQLGGDKEPTETIGDLSICLDGLQLESEVVTNGETTCSENGVSLCLPRLECNSAISAHCNLCLPGLSDSPISASRVAGFTGASQNDDGSRSKDETRVSTNGSDDPEDAGAGENRRVSGNNSPSLSNGGFKPSRPPRPSRPPPPTPRRPASVNGSPSATSESDGSSTGSLPPTNTNTNTSEGATSGLIIPLTISGGSGPRPLNPVTQAPLPPGWEQRVDQHGRVYYVDHVEKRTTWDRPEPLPPGWERRVDNMGRIYYVDHFTRTTTWQRPTLESVRNYEQWQLQRSQLQGAMQQFNQRFIYGNQDLFATSQSKEFDPLGPLPPGWEKRTDSNGRVYFVNHNTRITQWEDPRSQGQLNEKPLPEGWEMRFTVDGIPYFVDHNRRTTTYIDPRTGKSALDNGPQIAYVRDFKAKVQYFRFWCQQLAMPQHIKITVTRKTLFEDSFQQIMSFSPQDLRRRLWVIFPGEEGLDYGGVAREWFFLLSHEVLNPMYCLFEYAGKDNYCLQINPASYINPDHLKYFRFIGRFIAMALFHGKFIDTGFSLPFYKRILNKPVGLKDLESIDPEFYNSLIWVKENNIEECDLEMYFSVDKEILGEIKSHDLKPNGGNILVTEENKEEYIRMVAEWRLSRGVEEQTQAFFEGFNEILPQQYLQYFDAKELEVLLCGMQEIDLNDWQRHAIYRHYARTSKQIMWFWQFVKEIDNEKRMRLLQFVTGTCRLPVGGFADLMGSNGPQKFCIEKVGKENWLPRSHTCFNRLDLPPYKSYEQLKEKLLFAIEETEGFGQE

SEQ ID NO: 74 - protein, 215 aa, Homo sapiens; identical to SEQ ID NO: 59

SEQ ID NO: 75 - protein, 339 aa, Homo sapiens [sequence omitted]

SEQ ID NO: 76 - protein, 444 aa, Homo sapiens; identical to SEQ ID NO: 40

SEQ ID NO: 77 - protein, 1192 aa, Homo sapiens
MEDLDQSPLVSSSDSPPRPQPAFKYQFVREPEDEEEEEEEEEEDEDEDLEELEVLERKPAAGLSAAPVPTAPAAGAPLMDFGNDFVPPAPRGPLPAAPPVAPERQPSWDPSPVSSTVPAPSPLSAAAVSPSKLPEDDEPPARPPPPPPASVSPQAEPVWTPPAPAPAAPPSTPAAPKRRGSSGSVDETLFALPAASEPVIRSSAENMDLKEQPGNTISAGQEDFPSVLLETAASLPSLSPLSAASFKEHEYLGNLSTVLPTEGTLQENVSEASKEVSEKAKTLLIDRDLTEFSELEYSEMGSSFSVSPKAESAVIVANPREEIIVKNKDEEEKLVSNNILHNQQELPTALTKLVKEDEVVSSEKAKDSFNEKRVAVEAPMREEYADFKPFERVWEVKDSKEDSDMLAAGGKIESNLESKVDKKCFADSLEQTNHEKDSESSNDDTSFPSTPEGIKDRSGAYITCAPFNPAATESIATNIFPLLGDPTSENKTDEKKIEEKKAQIVTEKNTSTKTSNPFLVAAQDSETDYVTTDNLTKVTEEVVANMPEGLTPDLVQEACESELNEVTGTKIAYETKMDLVQTSEVMQESLYPAAQLCPSFEESEATPSPVLPDIVMEAPLNSAVPSAGASVIQPSSSPLEASSVNYESIKHEPENPPPYEEAMSVSLKKVSGIKEEIKEPENINAALQETEAPYISIACDLIKETKLSAEPAPDFSDYSEMAKVEQPVPDHSELVEDSSPDSEPVDLFSDDSIPDVPQKQDETVMLVKESLTETSFESMIEYENKEKLSALPPEGGKPYLESFKLSLDNTKDTLLPDEVSTLSKKEKIPLQMEELSTAVYSNDDLFISKEAQIRETETFSDSSPIEIIDEFPTLISSKTDSFSKLAREYTDLEVSHKSEIANAPDGAGSLPCTELPHDLSLKNIQPKVEEKISFSDDFSKNGSATSKVLLLPPDVSALATQAEIESIVKPKVLVKEAEKKLPSDTEKEDRSPSAIFSAELSKTSVVDLLYWRDIKKTGVVFGASLFLLLSLTVFSIVSVTAYIALALLSVTISFRIYKGVIQAIQKSDEGHPFRAYLESEVAISEELVQKYSNSALGHVNCTIKELRRLFLVDDLVDSLKFAVLMWVFTYVGALFNGLTLLILALISLFSVPVIYERHQAQIDHYLGLANKNVKDAMAKIQAKIPGLKRKAE

SEQ ID NO: 78 - protein, 1106 aa, Homo sapiens
MRLPGAMPALALKGELLLLSLLLLLEPQISQGLVVTPPGPELVLNVSSTFVLTCSGSAPVVWERMSQEPPQEMAKAQDGTFSSVLTLTNLTGLDTGEYFCTHNDSRGLETDERKRLYIFVPDPTVGFLPNDAEELFIFLTEITEITIPCRVTDPQLVVTLHEKKGDVALPVPYDHQRGFSGIFEDRSYICKTTIGDREVDSDAYYVYRLQVSSINVSVNAVQTVVRQGENITLMCIVIGNEVVNFEWTYPRKESGRLVEPVTDFLLDMPYHIRSILHIPSAELEDSGTYTCNVTESVNDHQDEKAINITVVESGYVRLLGEVGTLQFAELHRSRTLQVVFEAYPPPTVLWFKDNRTLGDSSAGEIALSTRNVSETRYVSELTLVRVKVAEAGHYTMRAFHEDAEVQLSFQLQINVPVRVLELSESHPDSGEQTVRCRGRGMPQPNIIWSACRDLKRCPRELPPTLLGNSSEEESQLETNVTYWEEEQEFEVVSTLRLQHVDRPLSVRCTLRNAVGQDTQEVIVVPHSLPFKVVVISAILALVVLTIISLIILIMLWQKKPRYEIRWKVIESVSSDGHEYIYVDPMQLPYDSTWELPRDQLVLGRTLGSGAFGQVVEATAHGLSHSQATMKVAVKMLKSTARSSEKQALMSELKIMSHLGPHLNVVNLLGACTKGGPIYIITEYCRYGDLVDYLHRNKHTFLQHHSDKRRPPSAELYSNALPVGLPLPSHVSLTGESDGGYMDMSKDESVDYVPMLDMKGDVKYADIESSNYMAPYDNYVPSAPERTCRATLINESPVLSYMDLVGFSYQVANGMEFLASKNCVHRDLAARNVLICEGKLVKICDFGLARDIMRDSNYISKGSTFLPLKWMAPESIFNSLYTTLSDVWSFGILLWEIFTLGGTPYPELPMNEQFYNAIKRGYRMAQPAHASDEIYEIMQKCWEEKFEIRPPFSQLVLLLERLLGEGYKKKYQQVDEEFLRSDHPAILRSQARLPGFHGLRSPLDTSSVLYTAVQPNEGDNDYIIPLPDPKPEVADEGPLEGSPSLASSTLNEVNTSSTISCDSPLEPQDEPEPEPQLELQVEPEPELEQLPDSGCPAPRAEAEDSFL

SEQ ID NO: 79 - protein, 236 aa, Homo sapiens
MASLDRVKVLVLGDSGVGKSSLVHLLCQNQVLGNPSWTVGCSVDVRVHDYKEGTPEEKTCYIELWDVGGSVGSASSVKSTRAVFYNSVNGIIFVHDLTNKKSSQNLRRWSLEALNRDLVPTGVLVTNGDYDQEQFADNQIPLLVIGTKLDQIHETKRHEVLTTTAFLAEDFNPEEINLDCTNPRYLAAGSSNAVKLSRFFDKVIEKRYFLREGNQIPGFPDRKRFGAGTLKSLHYD

SEQ ID NO: 80 - protein, 1070 aa, Homo sapiens [sequence omitted]

SEQ ID NO: 81 - protein, 457 aa, Homo sapiens [sequence omitted]

SEQ ID NO: 82 - protein, 427 aa, Homo sapiens
MFFSMGFIVAVKGKIASPLEAPVFVAAPHSTFFDGIACVVAGLPSMVSRNENAQVPLIGRLLRAVQPVLVSRVDPDSRKNTINEIIKRTTSGGEWPQILVFPEGTCTNRSCLITFKPGAFIPGVPVQPVLLRYPNKLDTVTWTWQGYTFIQLCMLTFCQLFTKVEVEFMPVQVPNDEEKNDPVLFANKVRNLMAEALGIPVTDHTYEDCRLMISAGQLTLPMEAGLVEFTKISRKLKLDWDGVRKHLDEYASIASSSKGGRIGIEEFAKYLKLPVSDVLRQLFALFDRNHDGSIDFREYVIGLAVLCNPSNTEEIIQVAFKLFDVDEDGYITEEEFSTILQASLGVPDLDVSGLFKEIAQGDSISYEEFKSFALKHPEYAKIFTTYLDLQTCHVFSLPKEVQTTPSTASNKVSPEKHEESTSDKKDD

SEQ ID NO: 83 - protein, 418 aa, Homo sapiens
MPSSVSWGILLLAGLCCLVPVSLAEDPQGDAAQKTDTSHHDQDHPTFNKITPNLAEFAFSLYRQLAHQSNSTNIFFSPVSIATAFAMLSLGTKADTHDEILEGLNFNLTEIPEAQIHEGFQELLRTLNQPDSQLQLTTGNGLFLSEGLKLVDKFLEDVKKLYHSEAFTVNFGDTEEAKKQINDYVEKGTQGKIVDLVKELDRDTVFALVNYIFFKGKWERPFEVKDTEEEDFHVDQVTTVKVPMMKRLGMFNIQHCKKLSSWVLLMKYLGNATAIFFLPDEGKLQHLENELTHDIITKFLENEDRRSASLHLPKLSITGTYDLKSVLGQLGITKVFSNGADLSGVTEEAPLKLSKAVHKAVLTIDEKGTEAAGAMFLEAIPMSIPPEVKFNKPFVFLMIEQNTKSPLFMGKVVNPTQK

SEQ ID NO: 84 - protein, 151 aa, Homo sapiens
MRPRRPHQIADLFRPKDQIAYSDTSPFLILSEASLADLNSRLEKKVKATNFRPNIVISGCDVYAEDSWDELLIGDVELKRVMACSRCILTTVDPDTGVMSRKEPLETLKSYRQCDPSERKLYGKSPLFGQYFVLENPGTIKVGDPVYLLGQ

SEQ ID NO: 85 - protein, 607 aa, Homo sapiens
MVSIPEYYEGKNVLLTGATGFLGKVLLEKLLRSCPKVNSVYVLVRQKAGQTPQERVEEVLSGKLFDRLRDENPDFREKIIAINSELTQPKLALSEEDKEVIIDSTNIIFHCAATVRFNENLRDAVQLNVIATRQLILLAQQMKNLEVFMHVSTAYAYCNRKHIDEVVYPPPVDPKKLIDSLEWMDDGLVNDITPKLIGDRPNTYIYTKALAEYVVQQEGAKLNVAIVRPSIVGASWKEPFPGWIDNFNGPSGLFIAAGKGILRTIRASNNALADLVPVDVVVNMSLAAAWYSGVNRPRNIMVYNCTTGSTNPFHWGEVEYHVISTFKRNPLEQAFRRPNVNLTSNHLLYHYWIAVSHKAPAFLYDIYLRMTGRSPRCPSFKFNSNSLSHHYRKGVSHRVSALLLDCTHVDRSETATFNIDVRQLHWAEYIENYCLGTKKYVLNEEMSGLPAARKHLNKTLFSLFHTALCHGKLTFVDDTFGFPCLLASGGPLLSVSLHFSAYVYSQIHLAFILRDLGSHSAPSLASLAGPRELTVGSLLDREWRQIKTDDFELGKSAGEVDLEGADIEGCLLATSPAVRQQALLQRGVQWYISIPTTQETVAMEMQI

SEQ ID NO: 86 - protein, 201 aa, Homo sapiens; identical to SEQ ID NO: 60

SEQ ID NO: 87 - protein, 275 aa, Homo sapiens
MSSFGYRTLTVALFTLICCPGSDEKVFEVHVRPKKLAVEPKGSLEVNCSTTCNQPEVGGLETSLNKILLDEQAQWKHYLVSNISHDTVLQCHFTCSGKQESMNSNVSVYQPPRQVILTLQPTLVAVGKSFTIECRVPTVEPLDSLTLFLFRGNETLHYETFGKAAPAPQEATATFNSTADREDGHRNFSCLAVLDLMSRGGNIFHKHSAPKMLEIYEPVSDSQMVIIVTVVSVLLSLFVTSVLLCFIFGQHLRQQRMGTYGVRAAWRRLPQAFRP

SEQ ID NO: 88 - protein, 336 aa, Homo sapiens
ASGEWRVSGGRPAGAGRPEEALAAGSDPRGAAARLACSAPTPGGGTMPFDFRRFDIYRKVPKDLTQPTYTGAIISICCCLFILFLFLSELTGFITTEVVNELYVDDPDKDSGGKIDVSLNISLPNLHCELVGLDIQDEMGRHEVGHIDNSMKIPLNNGAGCRFEGQFSINKVPGNFHVSTHSATAQPQNPDMTHVIHKLSFGDTLQVQNIHGAFNALGGADRLTSNPLASHDYILKIVPTVYEDKSGKQRYSYQYTVANKEYVAYSHTGRIIPAIWFRYDLSPITVKYTERRQPLYRFITTICAIIGGTFTVAGILDSCIFTASEAWKKIQLGKMH

SEQ ID NO: 89 - protein, 651 aa, Homo sapiens
NSKKMQSWYSMLSPTYKQRNEDFRKLFSKLPEAERLIVDYSCALQREILLQGRLYLSENWICFYSNIFRWETTISIQLKEVTCLKKEKTAKLIPNAIQICTESEKHFFTSFGARDRCFLLIFRLWQNALLEKTLSPRELWHLVHQCYGSELGLTSEDEDYVSPLQLNGLGTPKEVGDVIALSDITSSGAADRSQEPSPVGSRRGHVTPNLSRASSDADHGAEEDKEEQVDSQPDASSSQTVTPVAEPPSTEPTQPDGPTTLGPLDLLPSEELLTDTSNSSSSTGEEADLAALLPDLSGRLLINSVFHVGAERLQQMLFSDSPFLQGFLQQCKFTDVTLSPWSGDSKCHQRRVLTYTIPISNPLGPKSASVVETQTLFRRGPQAGGCVVDSEVLTQGIPYQDYFYTAHRYCILGLARNKARLRVSSEIRYRKQPWSLVKSLIEKNSWSGIEDYFHHLERELAKAEKLSLEEGGKDARGLLSGLRRRKRPLSWRAHGDGPQHPDPDPCARAGIHTSGSLSSRFSEPSVDQGPGAGIPSALVLISIVSLIILIALNVLLFYRLWSLERTAHTFESWHSLALAKGKFPQTATEWAEILALQKQFHSVEVHKWRQILRASVELLDEMKFSLEKLHQGITVSDPPFDTQPRPDDSFS

SEQ ID NO: 90 - protein, 1356 aa, Homo sapiens [sequence omitted]

SEQ ID NO: 91 - protein, 208 aa, Homo sapiens; identical to SEQ ID NO: 8

SEQ ID NO: 92 - protein, 875 aa, Homo sapiens
MTLARFVLALMLGALPEVVGFDSVLNDSLHHSHRHSPPAGPHYPYYLPTQQRPPTTRPPPPLPRFPRPPRALPAQRPHALQAGHTPRPHPWGCPAGEPWVSVTDFGAPCLRWAEVPPFLERSPPASWAQLRGQRHNFCRSPDGAGRPWCFYGDARGKVDWGYCDCRHGSVRLRGGKNEFEGTVEVYASGVWGTVCSSHWDDSDASVICHQLQLGGKGIAKQTPFSGLGLIPIYWSNVRCRGDEENILLCEKDIWQGGVCPQKMAAAVTCSFSHGPTFPIIRLAGGSSVHEGRVELYHAGQWGTVCDDQWDDADAEVICRQLGLSGIAKAWHQAYFGEGSGPVMLDEVRCTGNELSIEQCPKSSWGEHNCGHKEDAGVSCTPLTDGVIRLAGGKGSHEGRLEVYYRGQWGTVCDDGWTELNTYVVCRQLGFKYGKQASANHFEESTGPIWLDDVSCSGKETRFLQCSRRQWGRHDCSHREDVSIACYPGGEGHRLSLGFPVRLMDGENKKEGRVEVFINGQWGTICDDGWTDKDAAVICRQLGYKGPARARTMAYFGEGKGPIHVDNVKCTGNERSLADCIKQDIGRHNCRHSEDAGVICDYFGKKASGNSNKESLSSVCGLRLLHRRQKRIIGGKNSLRGGWPWQVSLRLKSSHGDGRLLCGATLLSSCWVLTAAHCFKRYGNSTRSYAVRVGDYHTLVPEEFEEEIGVQQIVIHREYRPDRSDYDIALVRLQGPEEQCARFSSHVLPACLPLWRERPQKTASNCYITGWGDTGRAYSRTLQQAAIPLLPKRFCEERYKGRFTGRMLCAGNLHEHKRVDSCQGDSGGPLMCERPGESWVVYGVTSWGYGCGVKDSPGVYTKVSAFVPWIKSVTKL

SEQ ID NO: 93 - protein, 713 aa, Homo sapiens
MEPGTGGSRKRLGPRAGFRFWPPFFPRRSQAGSSKFPTPLGPENSGNPTLLSSAQPETRVSYWTKLLSQLLAPLPGLLQKVLIWSQLFGGMFPTRWLDFAGVYSALRALKGREKPAAPTAQKSLSSLQLDSSDPSVTSPLDWLEEGIHWQYSPPDLKLELKAKGSALDPAAQAFLLEQQLWGVELLPSSLQSRLYSNRELGSSPSGPLNIQRIDDFSVVSYLLNPSYLDCFPRLEVSYQNSDGNSEVVGFQTLTPESSCLREDHCHPQPLSAELIPASWQGCPPLSTEGLPEIHHLRMKRLEFLQQASKGQDLPTPDQDNGYHSLEEEHSLLRMDPKHCRDNPTQFVPAAGDIPGNTQESTEEKIELLTTEVPLALEEESPSEGCPSSEIPMEKEPGEGRISVVDYSYLEGDLPISARPACSNKLIDYILGGASSDLETSSDPEGEDWDEEAEDDGFDSDSSLSDSDLEQDPEGLHLWNSFCSVDPYNPQNFTATIQTAARIVPEEPSDSEKDLSGKSDLENSSQSGSLPETPEHSSGEEDDWESSADEAESLKLWNSFCNSDDPYNPLNFKAPFQTSGENEKGCRDSKTPSESIVAISECHTLLSCKVQLLGSQESECPDSVQRDVLSGGRHTHVKRKKVTFLEEVTEYYISGDEDRKGPWEEFARDGCRFQKRIQETEDAIGYCLTFEHRERMFNRLQGTCFKGLNVLKQC

SEQ ID NO: 94 - protein, 667 aa, Homo sapiens
MAAETLLSSLLGLLLLGLLLPASLTGGVGSLNLEELSEMRYGIEILPLPVMGGQSQSSDVVIVSSKYKQRYECRLPAGAIHFQREREEETPAYQGPGIPELLSPMRDAPCLLKTKDWWTYEFCYGRHIQQYHMEDSEIKGEVLYLGYYQSAFDWDDETAKASKQHRLKRYHSQTYGNGSKCDLNGRPREAEVRFLCDEGAGISGDYIDRVDEPLSCSYVLTIRTPRLCPHPLLRPPPSAAPQAILCHPSLQPEEYMAYVQRQADSKQYGDKIIEELQDLGPQVWSETKSGVAPQKMAGASPTKDDSKDSDFWKMLNEPEDQAPGGEEVPAEEQDPSPEAADSASGAPNDFQNNVQVKVIRSPADLIRFIEELKGGTKKGKPNIGQEQPVDDAAEVPQREPEKERGDPERQREMEEEEDEDEDEDEDEDERQLLGEFEKELEGILLPSDRDRLRSEVKAGMERELENIIQETEKELDPDGLKKESERDRAMLALTSTLNKLIKRLEEKQSPELVKKHKKKRVVPKKPPPSPQPTEEDPEHRVRVRVTKLRLGGPNQDLTVLEMKRENPQLKQIEGLVKELLEREGLTAAGKIEIKIVRPWAEGTEEGARWLTDEDTRNLKEIFFNILVPGAEEAQKERQRQKELESNYRRVWGSPGGEGTGDLDEFDF

SEQ ID NO: 95 - protein, 211 aa, Homo sapiens
MAVVPLLLLGGLWSAVGASSLGVVTCGSVVKLLNTRHNVRLHSHDVRYGSGSGQQSVTGVTSVDDSNSYWRIRGKSATVCERGTPIKCGQPIRLTHVNTGRNLHSHHFTSPLSGNQEVSAFGEEGEGDYLDDWTVLCNGPYWVRDGEVRFKHSSTEVLLSVTGEQYGRPISGQKEVHGMAQPSQNNYWKAMEGIFMKPSELLKAEAHHAEL

SEQ ID NO: 96 - protein, 801 aa, Homo sapiens
MEASGKLICRQRQVLFSFLLLGLSLAGAAEPRSYSVVEETEGSSFVTNLAKDLGLEQREFSRRGVRVVSRGNKLHLQLNQETADLLLNEKLDREDLCGHTEPCVLRFQVLLESPFEFFQAELQVIDINDHSPVFLDKQMLVKVSESSPPGTAFPLKNAEDLDIGQNNIENYIISPNSYFRVLTRKRSDGRKYPELVLDNALDREEEAELRLTLTALDGGSPPRSGTAQVYIEVVDVNDNAPEFQQPFYRVQISEDSPISFLVVKVSATDVDTGVNGEISYSLFQASDEISKTFKVDFLTGEIRLKKQLDFEKFQSYEVNIEARDAGGFSGKCTVLIQVIDVNDHAPEVTMSAFTSPIPENAPETVVALFSVSDLDSGENGKISCSIQEDLPFLLKSSVGNFYTLLTETPLDRESRAEYNVTITVTDLGTPRLTTHLNMTVLVSDVNDNAPAFTQTSYTLFVRENNSPALHIGSVSATDRDSGTNAQVTYSLLPPQDPHLPLASLVSINTDNGHLFALRSLDYEALQAFEFRVGASDRGSPALSSEALVRVLVLDANDNSPFVLYPLQNGSAPCTELVPRAAEPGYLVTKVVAVDGDSGQNAWLSYQLLKATEPGLFGVWAHNGEVRTARLLSERDAAKQRLVVLVKDNGEPPCSATATLHLLLVDGFSQPYLPLPEAAPAQGQADSLTVYLVVALASVSSLFLFSVLLFVAVLLCRRSRAASVGRCSVPEGPFPGHLVDVRGTGSLSQNYQYEVCLAGGSGTNEFQFLKPVLPNIQGHSFGPEMEQNSNFRNGFGFSLQLK

SEQ ID NO: 97 - protein, 270 aa, Homo sapiens
MASRGVVGIFFLSAVPLVCLELRRGIPDIGIKDFLLLCGRILLLLALLTLIISVTTSWLNSFKSPQVYLKEEEEKNEKRQKLVRKKQQEAQGEKASRYIENVLKPHQEMKLRKLEERFYQMTGEAWKLSSGHKLGGDEGTSQTSFETSNREAAKSQNLPKPLTEFPSPAEQPTCKEIPDLPEEPSQTAEEVVTVALRCPSGNVLRRRFLKSYSSQVLFDWMTRIGYHISLYSLSTSFPRRPLAVEGGQSLEDIGITVDTVLILEEKEQTN

SEQ ID NO: 98 - protein, 180 aa, Homo sapiens
MAAAEEEDGGPEGPNRERGGAGATFECNICLETAREAVVSVCGHLYCWPCLHQWLETRPERQECPVCKAGISREKVVPLYGRGSQKPQDPRLKTPPRPQGQRPAPESRGGFQPFGDTGGFHFSFGVGAFPFGFFTTVFNAHEPFRRGTGVDLGQGHPASSWQDSLFLFLAIFFFFWLLSI

SEQ ID NO: 99 - protein, 300 aa, Homo sapiens; identical to SEQ ID NO: 21

SEQ ID NO: 100 - protein, 221 aa, Homo sapiens
MWSAGRGGAAWPVLLGLLLALLVPGGGAAKTGAELVTCGSVLKLLNTHHRVRLHSHDIKYGSGSGQQSVTGVEASDDANSYWRIRGGSEGGCPCGSPVRCGQAVRLTHVLTGKNLHTHHFPSPLSNNQEVSAFGEDGEGDDLDLWTVRCSGQHWEREAAVRLQHVGTSVFLSVTGEQYGSPIRGQHEVHGMPSANTHNTWKAMEGIFIKPSVEPSAGHDEL

SEQ ID NO: 101 - protein, 287 aa, Homo sapiens
GRWASGEMAPSGSLAVPLAVLVLLLWGAPWTHGRRSNVRVITDENWRELLEGDWMIEFYAPWCPACQNLQPEWESFAEWGEDLEVNIAKVDVTEQPGLSGRFIITALPTIYHCKDGEFRRYQGPRTKKDFINFISDKEWKSIEPVSSWFGPGSVLMSSMSALFQLSMWIRTCHNYFIEDLGLPVWGSYTVFALATLFSGLLLGLCMIFVADCLCPSKRRRPQPYPYPSKKLLSESAQPLKKVEEEQEADEEDVSEEEAESKEGTNKDFPQNAIRQRSLGPSLATDKS

SEQ ID NO: 102 - protein, 282 aa, Homo sapiens
AVPPTYADLGKSARDVFTKGYGFGLIKLDLKTKSENGLEFTSSGSANTETTKVTGSLETKYRWTEYGLTFTEKWNTDNTLGTEITVEDQLARGLKLTFDSSFSPNTGKKNAKIKTGYKREHINLGCDMDFDIAGPSIRGALVLGYEGWLAGYQMNFETAKSRVTQSNFAVGYKTDEFQLHTNVNDGTEFGGSIYQKVNKKLETAVNLAWTAGNSNTRFGIAAKYQIDPDACFSAKVNNSSLIGLGYTQTLKPGIKLTLSALLDGKNVNAGGHKLGLGLEFQA

SEQ ID NO: 103 - protein, 1704 aa, Homo sapiens
MAVLRQLALLLWKNYTLQKRKVLVTVLELFLPLLFPGILIWLRLKIQSENVPNATIYPGQSIQELPLFFTFPPPGDTWELAYIPSHSDAAKTVTETVRRALVINMRVRGFPSEKDFEDYIRYDNCSSSVLAAVVFEHPFNHSKEPLPLAVKYHLRFSYTRRNYMWTQTGSFFLKETEGWHTTSLFPLFPNPGPRELTSPDGGEPGYIREGFLAVQHAVDRAIMEYHADAATRQLFQRLTVTIKRFPYPPFIADPFLVAIQYQLPLLLLLSFTYTALTIARAVVQEKERRLKEYMRMMGLSSWLHWSAWFLLFFLFLLIAASFMTLLFCVKVKPNVAVLSRSDPSLVLAFLLCFAISTISFSFMVSTFFSKANMAAAFGGFLYFFTYIPYFFVAPRYNWMTLSQKLCSCLLSNVAMAMGAQLIGKFEAKGMGIQWRDLLSPVNVDDDFCFGQVLGMLLLDSVLYGLVTWYMEAVFPGQFGVPQPWYFFIMPSYWCGKPRAVAGKEEEDSDPEKALRNEYFEAEPEDLVAGIKIKHLSKVFRVGNKDRAAVRDLNLNLYEGQITVLLGHNGAGKTTTLSMLTGLFPPTSGRAYISGYEISQDMVQIRKSLGLCPQHDILFDNLTVAEHLYFYAQLKGLSRQKCPEEVKQMLHIIGLEDKWNSRSRFLSGGMRRKLSIGIALIAGSKVLILDEPTSGMDAISRRAIWDLLQRQKSDRTIVLTTHFMDEADLLGDRIAIMAKGELQCCGSSLFLKQKYGAGYHMTLVKEPHCNPEDISQLVHHHVPNATLESSAGAELSFILPRESTHRFEGLFAKLEKKQKELGIASFGASITTMEEVFLRVGKLVDSSMDIQAIQLPALQYQHERRASDWAVDSNLCGAMDPSDGIGALIEEERTAVKLNTGLALHCQQFWAMFLKKAAYSWREWKMVAAQVLVPLTCVTLALLAINYSSELFDDPMLRLTLGEYGRTVVPFSVPGTSQLGQQLSEHLKDALQAEGQEPREVLGDLEEFLIFRASVEGGGFNERCLVAASFRDVGERTVVNALFNNQAYHSPATALAVVDNLLFKLLCGPHASIVVSNFPQPRSALQAAKDQFNEGRKGFDIALNLLFAMAFLASTFSILAVSERAVQAKHVQFVSGVHVASFWLSALLWDLISFLIPSLLLLVVFKAFDVRAFTRDGHMADTLLLLLLYGWAIIPLMYLMNFFFLGAATAYTRLTIFNILSGIATFLMVTIMRIPAVKLEELSKTLDHVFLVLPNHCLGMAVSSFYENYETRRYCTSSEVAAHYCKKYNIQYQENFYAWSAPGVGRFVASMAASGCAYLILLFLIETNLLQRLRGILCALRRRRTLTELYTRMPVLPEDQDVADERTRILAPSPDSLLHTPLIIKELSKVYEQRVPLLAVDRLSLAVQKGECFGLLGFNGAGKTTTFKMLTGEESLTSGDAFVGGHRISSDVGKVRQRIGYCPQFDALLDHMTGREMLVMYARLRGIPERHIGACVENTLRGLLLEPHANKLVRTYSGGNKRKLSTGIALIGEPAVIFLDEPSTGMDPVARRLLWDTVARARESGKAIIITSHSMEECEALCTRLAIMVQGQFKCLGSPQHLKSKFGSGYSLRAKVQSEGQQEALEEFKAFVDLTFPGSVLEDEHQGMVHYHLPGRDLSWAKVFGILEKAKEKYGVDDYSVSQISLEQVFLSFAHLQPPTAEEGR

SEQ ID NO: 104 - protein, 473 aa, Homo sapiens
MLKVTVPSCSASSCSSVTASAAPGTASLVPDYWIDGSNRDALSDFFEVESELGRGATSIVYRCKQKGTQKPYALKVLKKTVDKKIVRTEIGVLLRLSHPNIIKLKEIFETPTEISLVLELVTGGELFDRIVEKGYYSERDAADAVKQILEAVAYLHENGIVHRDLKPENLLYATPAPDAPLKIADFGLSKIVEHQVLMKTVCGTPGYCAPEILRGCAYGPEVDMWSVGIITYILLCGFEPFYDERGDQFMFRRILNCEYYFISPWWDEVSLNAKDLVRKLIVLDPKKRLTTFQALQHPWVTGKAANFVHMDTAQKKLQEFNARRKLKAAVKAVVASSRLGSASSSHGSIQESHKASRDPSPIQDGNEDMKAIPEGEKIQGDGAQAAVKGAQAELMKVQALEKVKGADINAEEAPKMVPKAVEDGIKVADLELEEGLAEEKLKTVEEAAAPREGQGSSAVGFEVPQQDVILPEY

SEQ ID NO: 105 - protein, 1522 aa, Homo sapiens
EPCALTPGPSHLALTFLPSKPGARPQPEGASWDAGPGGAPSAWADPGEGGPSPMLLPEGLSSQALSTEAPLPATLEPRIVMGEETCQALLSPRAARTALRDQEGGHASPDPPPELCSQGDLSVPSPPPDPDSFFTPPSTPTKTTYALLPACGPHGDARDSEAELRDELLDSPPASPSGSYITADGDSWASSPSCSLSLLAPAEGLDFPSGWGLSPQGSMVDERELHPAGTPEPPSSESSLSADSSSSWGQEGHFFDLDFLANDPMIPAALLPFQGSLIFQVEAVEVTPLSPEEEEEEAVADPDPGGDLAGEGEEDSTSASFLQSLSDLSITEGMDEAFAFRDDTSAASSDSDSASYAEADDERLYSGEPHAQATLLQDSVQKTEEESGGGAKGLQAQDGTVSWAVEAAPQTSDRGAYLSQRQELISEVTEEGLALGQESTATVTPHTLQVAPGLQVEVATRVTPQAGEEETDSTAGQESAAMAMPQPSQEGISEILGQESVTAEKLPTPQEETSLTLCPDSPQNLKEEGGLDLPSGRKPVAAATIVPRQAKEDLTLPQDSAMTPPLPLQDTDLSSAPKPVAAATIVSQQAEEGLTLPQDSVMTPPLPLQDTELSSAPKPVAAATLVSQQAEEGLTLPQDSAMTPPLPLQDTDLSSAPKPVAAATLVSQQAEEGLTLPQDSAMTPPLPLQDTDLSSAPKPVAAATLVSQQAEEGLTLPQDSAMTPPLPLQDTDLSSAPKPVAAATIVSQQAEEGLTLPQDSAMTPPLPLQDTDLSSAPKPVAAATIVSQQAEEGLTLPQDSAMTPPLPLQDTDLSSAPKPVAAATPVSQQAEEGLTLPQDSAMTPPLPLQDTDLSSAPKPVAAATPVSQQAEEGLTLPQDSAMTAPLPLQDTGPTSGPEPLAVATPQTLQAEAGCAPGTEPVATMAQQEVGEALGPRPAPEEKNAALPTVPEPAALDQVQQDDPQPAAEAGTPWAAQEDADSTLGMEALSLPEPASGAGEEIAEALSRPGREACLEARAHTGDGAKPDSPQKETLEVENQQEGGLKLLAQEHGPRSALGGAREVPDAPPAACPEVSQARLLSPAREERGLSGKSTPEPTLPSAVATEASLDSCPESSVGAVSSLDRGCPDAPAPTSAPTSQQPEPVLGLGSVEQPHEVPSVLGTPLLQPPENLAKGQPSTPVDRPLGPDPSAPGTLAGAALPPLEPPAPCLCQDPQEDSVEDEEPPGSLGLPPPQAGVQPAAAAVSGTTQPLGTGPRVSLSPHSPLLSPKVASMDAKDLALQILPPCQVPPPSGPQSPAGPQGLSAPEQQEDEDSLEEDSPRALGSGQHSDSHGESSAELDEQDILAPQTVQCPAQAPAGGSEETIAKAKQSRSEKKARKAMSKLGLRQIQGVTRITIQKSKNILFVIAKPDVFKSPASDTYVVFGEAKIEDLSQQVHKAAAEKFKVPSEPSALVPESAPRPRVRLECKEEEEEEEEEVDEAGLELRDIELVMAQANVSRAKAVRALRDNHSDIVNAIMELTM

SEQ ID NO: 106 - protein, 1144 aa, Homo sapiens
MMRQAPTARKTTTRRPKPTRPASTGVAGASSSLGPSGSASAGELSSSEPSTPAQTPLAAPIIPTPVLTSPGAVPPLPSPSKEEEGLRAQVRDLEEKLETLRLKRAEDKAKLKELEKHKIQLEQVQEWKSKMQEQQADLQRRLKEARKEAKEALEAKERYMEEMADTADAIEMATLDKEMAEERAESLQQEVEALKERVDELTTDLEILKAEIEEKGSDGAASSYQLKQLEEQNARLKDALVRMRDLSSSEKQEHVKLQKLMEKKNQELEVVRQQRERLQEELSQAESTIDELKEQVDAALGAEEMVEMLTDRNLNLEEKVRELRETVGDLEAMNEMNDELQENARETELELREQLDMAGARVREAQKRVEAAQETVADYQQTIKKYRQLTAHLQDVNRELTNQQEASVERQQQPPPETFDFKIKFAETKAHAKAIEMELRQMEVAQANRHMSLLTAFMPDSFLRPGGDHDCVLVLLLMPRLICKAELIRKQAQEKFELSENCSERPGLRGAAGEQLSFAAGLVYSLSLLQATLHRYEHALSQCSVDVYKKVGSLYPEMSAHERSLDFLIELLHKDQLDETVNVEPLTKAIKYYQHLYSIHLAEQPEDCTMQLADHIKFTQSALDCMSVEVGRLRAFLQGGQEATDIALLLRDLETSCSDIRQFCKKIRRRMPGTDAPGIPAALAFGPQVSDTLLDCRKHLTWVVAVLQEVAAAAAQLIAPLAENEGLLVAALEELAFKASEQIYGTPSSSPYECLRQSCNILISTMNKLATAMQEGEYDAERPPSKPPPVELRAAALRAEITDAEGLGLKLEDRETVIKELKKSLKIKGEELSEANVRLSLLEKKLDSAAKDADERIEKVQTRLEETQALLRKKEKEFEETMDALQADIDQLEAEKAELKQRLNSQSKRTIEGLRGPPPSGIATLVSGIAGEEQQRGAIPGQAPGSVPGPGLVKDSPLLLQQISAMRLHISQLQHENSILKGAQMKASLASLPPLHVAKLSHEGPGSELPAGALYRKTSQLLETLNQLSTHTHVVDITRTSPAAKSPSAQLMEQVAQLKSLSDTVEKLKDEVLKETVSQRPGATVPTDFATFPSSAFLRAKEEQQDDTVYMGKVTFSCAAGFGQRHRLVLTQEQLHQLHSRLIS

SEQ ID NO: 107 - protein, 1777 aa, Homo sapiens; identical to SEQ ID NO: 17

SEQ ID NO: 108 - protein, 720 aa, Homo sapiens; identical to SEQ ID NO: 11

SEQ ID NO: 109 - protein, 711 aa, Homo sapiens
MKLKLNVLTIILLPVHLLITIYSALIFIPWYFLTNAKKKNAMAKRIKAKPTSDKPGSPYRSVTHFDSLAVIDIPGADTLDKLFDHAVSKFGKKDSLGTREILSEENEMQPNGKVFKKLILGNYKWMNYLEVNRRVNNFGSGLTALGLKPKNTIAIFCETRAEWMIAAQTCFKYNFPLVTLYATLGKEAVVHGLNESEASYLITSVELLESKLKTALLDISCVKHIIYVDNKAINKAEYPEGFEIHSMQSVEELGSNPENLGIPPSRPTPSDMAIVMYTSGSTGRPKGVMMHHSNLIAGMTGQCERIPGLGPKDTYIGYLPLAHVLELTAEISCFTYGCRIGYSSPLTLSDQSSKIKKGSKGDCTVLKPTLMAAVPEIMDRIYKNVMSKVQEMNYIQKTLFKIGYDYKLEQIKKGYDAPLCNLLLFKKVKALLGGNVRMMLSGGAPLSPQTHRFMNVCFCCPIGQGYGLTESCGAGTVTEVTDYTTGRVGAPLICCEIKLKDWQEGGYTINDKPNPRGEIVIGGQNISMGYFKNEEKTAEDYSVDENGQRWFCTGDIGEFHPDGCLQIIDRKKDLVKLQAGEYVSLGKVEAALKNCPLIDNICAFAKSDQSYVISFVVPNQKRLTLLAQQKGVEGTWVDICNNPAMEAEILKEIREAANAMKLERFEIPIKVRLSPEPWTPETGLVTDAFKLKRKELRNHYLKDIERMYGGK

SEQ ID NO: 110 - protein, 819 aa, Homo sapiens
MDTEGFGELLQQAEQLAAETEGISELPHVERNLQEIQQAGERLRSRTLTRTSQETADVKASVLLGSRGLDISHISQRLESLSAATTFEPLEPVKDTDIQGFLKNEKDNALLSAIEESRKRTFGMAEEYHRESMLVEWEQVKQRILHTLLASGEDALDFTQESEPSYISDVGPPGRSSLDNIEMAYARQIYIYNEKIVNGHLQPNLVDLCASVAELDDKSISDMWTMVKQMTDVLLTPATDALKNRSSVEVRMEFVRQALAYLEQSYKNYTLVTVFGNLHQAQLGGVPGTYQLVRSFLNIKLPAPLPGLQDGEVEGHPVWALIYYCMRCGDLLAASQVVNRAQHQLGEFKTWFQEYMNSKDRRLSPATENKLRLHYRRALRNNTDPYKRAVYCIIGRCDVTDNQSEVADKTEDYLWLKLNQVCFDDDGTSSPQDRLTLSQFQKQLLEDYGESHFTVNQQPFLYFQVLFLTAQFEAAVAFLFRMERLRCHAVHVALVLFELKLLLKSSGQSAQLLSHEPGDPPCLRRLNFVRLLMLYTRKFESTDPREALQYFYFLRDEKDSQGENMFLRCVSELVIESREFDMILGKLENDGSRKPGVIDKFTSDTKPIINKVASVAENKGLFEEAAKLYDLAKNADKVLELMNKLLSPVVPQISAPQSNKERLKNMALSIAERYRAQGISANKFVDSTFYLLLDLITFFDEYHSGHIDRAFDIIERLKLVPLNQESVEERVAAFRNFSDEIRHNLSEVLLATMNILFTQFKRLKGTSPSSSSRPQRVIEDRDSQLRSQARTLITFAGMIPYRTSGDTNARLVQMEVLMN

SEQ ID NO: 111 - protein, 1239 aa, Homo sapiens
MLLVLECVLFSVAQGYFRMDSSATQFHIETHENTSGLWSIWYRNHFDRSVVLNDVFLSKETKHMLKILNFTGPLFLPPGCWNIFSLKLAVKDIAINLFTNVFLTTNIGAIFAIPLQIYSAPTKEGSLGFEVIAHCGMHYFMGKSKAGNPNWNGSLSLDQSTWNVDSELANKLYERWKKYKNGDVCKRNVLGTTRFAHLKKSKESESFVFFLPRLIAEPGLMLNFSATALRSRMIKYFVVQNPSSWPVSLQLLPLSLYPKPEALVHLLHRWFGTDMQMINFTTGEFQLTEACPYLGTHSEESRFGILHLHLQPLEMKRVGVVFTPADYGKVTSLILIRNNLTVIDMIGVEGFGARELLKVGGRLPGAGGSLRFKVPESTLMDCRRQLKDSKQILSITKNFKVENIGPLPITVSSLKINGYNCQGYGFEVLDCHQFSLDPNTSRDISIVFTPDFTSSWVIRDLSLVTAADLEFRFTLNVTLPHHLLPLCADVVPGPSWEESFWRLTVFFVSLSLLGVILIAFQQAQYILMEFMKTRQRQNASSSSQQNNGPMDVISPHSYKSNCKNFLDTYGPSDKGRGKNCLPVNTPQSRIQNAAKRSPATYGHSQKKHKCSVYYSKHKTSTAAASSTSTTTEEKQTSPLGSSLPAAKEDICTDAMRENWISLRYASGINVNLQKNLTLPKNLLNKEENTLKNTIVFSNPSSECSMKEGIQTCMFPKETDIKTSENTAEFKERELCPLKTSKKLPENHLPRNSPQYHQPDLPEISRKNNGNNQQVPVKNEVDHCENLKKVDTKPSSEKKIHKTSREDMFSEKQDIPFVEQEDPYRKKKLQEKREGNLQNLNWSKSRTCRKNKKRGVAPVSRPPEQSDLKLVCSDFERSELSSDINVRSWCIQESTREVCKADAEIASSLPAAQREAEGYYQKPEKKCVDKFCSDSSSDCGSSSGSVRASRGSWGSWSSTSSSDGDKKPMVDAQHFLPAGDSVSQNDFPSEAPISLNLSHNICNPMTVNSLPQYAEPSCPSLPAGPTGVEEDKGLYSPGDLWPTPPVCVTSSLNCTLENGVPCVIQESAPVHNSFIDWSATCEGQFSSAYCPLELNDYNAFPEENMNYANGFPCPADVQTDFIDHNSQSTWNTPPNMPAAWGHASFISSPPYLTSTRSLSPMSGLFGSIWAPQSDVYENCCPINPTTEHSTHMENQAVVCKEYYPGFNPFRAYMNLDIWTTTANRNANFPLSRDSSYCGNV

SEQ ID NO: 112 - protein, 1323 aa, Homo sapiens [sequence omitted]

SEQ ID NO: 113 - protein, 310 aa, Homo sapiens
HPAGLAAAAAGTPRLPSKRRIPVSQPGMADPHQLFDDTSSAQSRGYGAQRAPGGLSYPAASPTPHAAFLADPVSNMAMAYGSSLAAQGKELVDKNIDRFIPITKLKYYFAVDTMYVGRKLGLLFFPYLHQDWEVQYQQDTPVAPRFDVNAPDLYIPAMAFITYVLVAGLALGTQDRFSPDLLGLQASSALAWLTLEVLAILLSLYLVTVNTDLTTIDLVAFLGYKYVGMIGGVLMGLLFGKIGYYLVLGWCCVAIFVFMIRTLRLKILADAAAEGVPVRGARNQLRMYLTMAVAAAQPMLMYWLTFHLVR

SEQ ID NO: 114 - protein, 283 aa, Homo sapiens; identical to SEQ ID NO: 33

SEQ ID NO: 115 - protein, 907 aa, Homo sapiens
MDTSRLGVLLSLPVLLQLATGGSSPRSGVLLRGCPTHCHCEPDGRMLLRVDCSDLGLSELPSNLSVFTSYLDLSMNNISQLLPNPLPSLRFLEELRLAGNALTYIPKGAFTGLYSLKVLMLQNNQLRHVPTEALQNLRSLQSLRLDANHISYVPPSCFSGLHSLRHLWLDDNALTEIPVQAFRSLSALQAMTLALNKIHHIPDYAFGNLSSLVVLHLHNNRIHSLGKKCFDGLHSLETLDLNYNNLDEFPTAIRTLSNLKELGFHSNNIRSIPEKAFVGNPSLITIHFYDNPIQFVGRSAFQHLPELRTLTLNGASQITEFPDLTGTANLESLTLTGAQISSLPQTVCNQLPNLQVLDLSYNLLEDLPSFSVCQKLQKIDLRHNEIYEIKVDTFQQLLSLRSLNLAWNKIAIIHPNAFSTLPSLIKLDLSSNLLSSFPITGLHGLTHLKLTGNHALQSLISSENFPELKVIEMPYAYQCCAFGVCENAYKISNQWNKGDNSSMDDLHKKDAGMFQAQDERDLEDFLLDFEEDLKALHSVQCSPSPGPFKPCEHLLDGWLIRIGVWTIAVLALTCNALVTSTVFRSPLYISPIKLLIGVIAAVNMLTGVSSAVLAGVDAFTFGSFARHGAWWENGVGCHVIGFLSIFASESSVFLLTLAALERGFSVKYSAKFETKAPFSSLKVIILLCALLALTMAAVPLLGGSKYGASPLCLPLPFGEPSTMGYMVALILLNSLCFLMMTIAYTKLYCNLDKGDLENIWDCSMVKHIALLLFTNCILNCPVAFLSFSSLINLTFISPEVIKFILLVVVPLPACLNPLLYILFNPHFKEDLVSLRKQTYVWTRSKHPSLMSINSDDVEKQSCDSTQALVTFTSSSITYDLPPSSVPSPAYPVTESCHLSSVAFVPCL

SEQ ID NO: 116 - protein, 378 aa, Homo sapiens
KEQSELDQDLDDVEEVEEEETGEETKLKARQLTVQMMQNPQILAALQERLDGLVETPTGYIESLPRVVKRRVNALKNLQVKCAQIEAKFYEEVHDLERKYAVLYQPLFDKRFEIINAIYEPTEEECEWKPDEEDEISEELKEKAKIEDEKKDEEKEDPKGIPEFWLTVFKNVDLLSDMVQEHDEPILKHLKDIKVKFSDAGQPMSFVLEFHFEPNEYFTNEVLTKTYRMRSEPDDSDPFSFDGPEIMGCTGCQIDWKKGKNVTLKTIKKKQKHKGRGTVRTVTKTVSNDSFFNFFAPPEVIPKFSAFDDDAEAILAADFEIGHFLRERIIPRSVLYFTGEAIEDDDDDYDEEGEEADEGYQLFEEVKSCSKLFQRWLQ

SEQ ID NO: 117 - protein, 562 aa, Homo sapiens
MRPEPGGCCCRRTVRANGCVANGEVRNGYVRSSAAAAAAAAAGQIHHVTQNGGLYKRPFNEAFEETPMLVAVLTYVGYGVLTLFGYLRDFLRYWRIEKCHHATEREEQKDFVSLYQDFENFYTRNLYMRIRDNWNRPICSVPGARVDIMERQSHDYNWSFKYTGNIIKGVINMGSYNYLGFARNTGSCQEAAAKVLEEYGAGVCSTRQEIGNLDKHEELEELVARFLGVEAAMAYGMGFATNSMNIPALVGKGCLILSDELNHASLVLGARLSGATIRIFKHNNMQSLEKLLKDAIVYGQPRTRRPWKKILILVEGIYSMEGSIVRLPEVIALKKKYKAYLYLDEAHSIGALGPTGRGVVEYFGLDPEDVDVMMGTFTKSFGASGGYIGGKKELIDYLRTHSHSAVYATSLSPPVVEQIITSMKCIMGQDGTSLGKECVQQLAENTRYFRRRLKEMGFIIYGNEDSPVVPLMLYMPAKIGAFGREMLKRNIGVVVVGFPATPIIESRARFCLSAAHTKEILDTALKEIDEVGDLLQLKYSRHRLVPLLDRPFDETTYEETED

SEQ ID NO: 118 - protein, 383 aa, Homo sapiens
MTATEALLRVLLLLLAFGHSTYGAECFPACNPQNGFCEDDNVCRCQPGWQGPLCDQCVTSPGCLHGLCGEPGQCICTDGWDGELCDRDVRACSSAPCANNGTCVSLDGGLYECSCAPGYSGKDCQKKDGPCVINGSPCQHGGTCVDDEGRASHASCLCPPGFSGNFCEIVANSCTPNPCENDGVCTDIGGDFRCRCPAGFIDKTCSRPVTNCASSPCQNGGTCLQHTQVSYECLCKPEFTGLTCVKKRALSPQQVTRLPSGYGLAYRLTPGVHELPVQQPEHRILKVSMKELNKKTPLLTEGQAICFTILGVLTSLVVLGTVGIVFLNKCETWVSNLRYNHMLRKKKNLLLQYNSGEDLAVNIIFPEKIDMTTFSKEAGDEEI

SEQ ID NO: 119 - protein, 226 aa, Homo sapiens
MAAAAVQGGRSGGSGGCSGAGGASNCGTGSGRSGLLDKWKIDDKPVKIDKWDGSAVKNSLDDSAKKVLLEKYKYVENFGLIDGRLTICTISCFFAIVALIWDYMHPFPESKPVLALCVISYFVMMGILTIYTSYKEKSIFLVAHRKDPTGMDPDDIWQLSSSLKRFDDKYTLKLTFISGRTKQQREAEFTKSIAKFFDHSGTLVMDAYEPEISRLHDSLAIERKIK

SEQ ID NO: 120 - protein, 100 aa, Homo sapiens
MDAEFRHDSGYEVHHQKLVFFAEDVGSNKGAIIGLMVGGVVIATVIVITLVMLKKKQYTSIHHGVVEVDAAVTPEERHLSKMQQNGYENPTYKFFEQMQN

SEQ ID NO: 121 - protein, 448 aa, Homo sapiens; identical to SEQ ID NO: 66

SEQ ID NO: 122 - protein, 501 aa, Homo sapiens [sequence omitted]

SEQ ID NO: 123 - protein, 323 aa, Homo sapiens
MGSRVSREDFEWVYTDQPHADRRREILAKYPEIKSLMKPDPNLIWIIIMMVLTQLGAFYIVKDLDWKWVIFGAYAFGSCINHSMTLAIHEIAHNAAFGNCKAMWNRWFGMFANLPIGIPYSISFKRYHMDHHRYLGADGVDVDIPTDFEGWFFCTAFRKFIWVILQPLFYAFRPLFINPKPITYLEVINTVAQVTFDILIYYFLGIKSLVYMLAASLLGLGLHPISGHFIAEHYMFLKGHETYSYYGPLNLLTFNVGYHNEHHDFPNIPGKSLPLVRKIAAEYYDNLPHYNSWIKVLYDFVMDDTISPYSRMKRHQKGEMVLE

SEQ ID NO: 124 - protein, 256 aa, Homo sapiens
MPGPATDAGKIPFCDAKEEIRAGLESSEGGGGPERPGARGQRQNIVWRNVVLMSLLHLGAVYSLVLIPKAKPLTLLWAYFCLLLAALGVTAGAHRLWSHRSYRAKLPLRIFLAVANSMAFQNDIFERSRDHRAHHKYSETDADPHNARRGFFFSHIGWLFVRKHRDVIEKGRKLDVTDLLADPVVRIQRNTQHIQKEGRALNQEAACEMLREWHQGHILKVTLPGLHILALLHTHCNHSEKCCLMLRALSVSLEVF

SEQ ID NO: 125 - protein, 445 aa, Homo sapiens
MGGVGEPGPREGPAQPGAPLPTFCWEQIRAHDQPGDKWLVIERRVYDISRWAQRHPGGSRLIGHHGAEDATDAFRAFHQDLNFVRKFLQPLLIGELAPEEPSQDGPLNAQLVEDFRALHQAAEDMKLFDASPTFFAFLLGHILAMEVLAWLLIYLLGPGWVPSALAAFILAISQAQSWCLQHDLGHASIFKKSWWNHVAQKFVMGQLKGFSAHWWNFRHFQHHAKPNIFHKDPDVTVAPVFLLGESSVEYGKKKRRYLPYNQQHLYFFLIGPPLLTLVNFEVENLAYMLVCMQWADLLWAASFYARFFLSYLPFYGVPGVLLFFVAVRVLESHWFVWITQMNHIPKEIGHEKHRDWVSSQLAATCNVEPSLFTNWFSGHLNFQIEHHLFPRMPRHNYSRVAPLVKSLCAKHGLSYEVKPFLTALVDIVRSLKKSGDIWLDAYLHQ

1. A pharmaceutical composition for the treatment of neurogenerative diseases comprising a FADS2 interacting molecule.

2. The pharmaceutical composition of claim 1, wherein the FADS2-interacting molecule is a FADS2 inhibitor.

3. The pharmaceutical composition of claim 2, wherein the FADS2 inhibitor is selected from the group consisting of antibodies, antisense oligonucleotides, siRNA, low molecular weight molecules (LMWs), binding peptides, aptamers, and ribozymes.

4. The pharmaceutical composition of claim 1, wherein the FADS2 is part of a protein complex comprising at least en one further protein selected from the proteins as listed in table 1, third column.

5. The pharmaceutical composition of claim 1, wherein the FADS2 interacting molecule modulates the activity of gamma secretase and/or beta secretase.

6. The pharmaceutical composition of claim 1, wherein the neurodegenerative disease is Alzheimer's disease.

7. A method for identifying a gamma secretase and/or a beta secretase modulator comprising the following steps:
a). identifying of a FADS2-interacting molecule by determining whether a given test compound is a FADS2-interacting molecule, and
b). determining whether the FADS2-interacting molecule of step a) is capable of modulating gamma secretase and/or beta secretase activity.

8. The method of claim 7, wherein in step a) the test compound is brought into contact with FADS2 and the interaction of FADS2 with the test compound is determined.

9. The method of claim 8, wherein the interaction of the test compound with FADS2 results in an inhibition of FADS2 activity.

10. The method of claim 7, wherein in step b) the ability of the gamma secretase and/or the beta secrease to cleave APP is measured.

11. A method for preparing a pharmaceutical composition for the treatment of neurodegenerative diseases comprising the following steps:
a). identifying a gamma secretase and/or beta secretase modulator according to claim 7, and
b). formulating the gamma secretase and/or beta secretase modulator to a pharmaceutical composition.

12. A protein complex comprising
a) FADS2 and
b) either one or more proteins of the Nicastrin (a) complex, of the Nicastrin (b) complex, of the Nicastrin (c) complex, of the BACE1-complex (a), of the BACE1-complex (b), of the Psen2-complex or of the PTK7 complex.

13. The complex of claim 12, wherein the one ore more proteins of the Nicastrin (a) complex are selected from the group consisting of
(i) “18 kDa microsomal signal peptidase subunit” (SEQ ID No: 53)
(ii) “25 kDa microsomal signal peptidase subunit” (SEQ ID No: 119)
(iii) “ATP-binding cassette, sub-family A, member 3” (SEQ ID No: 103),
(iv) “Aph-1a” (SEQ ID No: 1),
(v) “BACE1” (SEQ ID No: 68),
(vi) “BSCv protein” (SEQ ID No: 70),
(vii) “CGI-13” (SEQ ID No: 72)
(viii) “Casein kinase II beta chain” (SEQ ID No: 74),
(ix) “Cathepsin B” (SEQ ID No: 75),
(x) “ENSG00000144840” (SEQ ID No: 79)
(xi) “FLJ13977” (SEQ ID No: 81),
(xii) “FLJ20342” (SEQ ID No: 56),
(xiii) “FLJ20481” (SEQ ID No: 82),
(xiv) “FLJ22390” (SEQ ID No: 84),
(xv) “Hypothetical protein tyrosine phosphatase ensgO0000149185” (SEQ ID No: 86),
(xvi) “ICAM-2” (SEQ ID No: 87)
(xvii) “KIAA1181” (SEQ ID No: 88),
(xiii) “KIAA1533” (SEQ ID No: 89),
(xix) “Mesenchymal stem cell protein DSCD75” (SEQ ID No: 91)
(xx) “NICE-3” (SEQ ID No: 58), (xxi) “Neurotypsin” (SEQ ID No: 92),
(xxii) “Nicastrin” (SEQ ID No: 9),
(xxiii) “PP1, regulatory subunit 15B” (SEQ ID No: 93)
(xxiv) “Pen-2” (SEQ ID No: 10) (xxv) “Presenilin-1” (SEQ ID No: 14),
(xxvi) “Presenilin-2” (SEQ ID No: 66),
(xxvii) “Protein amplified in osteosarcoma (OS-9)” (SEQ ID No: 94)
(xxviii) “Protein similar to stromal cell-derived factor 2” (SEQ ID No: 95)
(xxix) “Protocadherin beta 8” (SEQ ID No: 96) (xxx) “REP8 protein” (SEQ ID No: 97)
(xxxi) “RING finger. protein 5” (SEQ ID No: 98)
(xxxii) “Retinal short-chain dehydrogenase/reductase retSDR2” (SEQ ID No: 99)
(xxxiii) “Stromal cell-derived factor 2-like 1” (SEQ ID No: 100)
(xxxiv) “Thioredoxin domain-containing protein” (SEQ ID No: 101), and
(xxxv) “Voltage-dependent anion channel 1” (SEQ ID No: 102), and wherein the one or more proteins of the Nicastrin (b) complex are selected from the group consisting of
(i) “18 kDa microsomal signal peptidase subunit” (SEQ ID No: 53)
(ii) “25 kDa microsomal signal peptidase subunit” (SEQ ID No: 119)
(iii) “ATP-binding cassette, sub-family A, member 3” (SEQ ID No: 103)
(iv) “Aph-1a” (SEQ ID No: 1)
(v) “BACE1” (SEQ ID No: 38)
(vi) “BSCv protein (FRAGMENT)” (SEQ ID No: 70)
(vii) “CAMK4” (SEQ ID No: 104)
(viii) “CGI-13” (SEQ ID No: 72)
(ix) “Casein kinase II beta chain” (SEQ ID No: 74)
(x) “Cathepsin B” (SEQ ID No: 75)
(xi) “DCTN1” (SEQ ID No: 106)
(xii) “ENSG00000144840” (SEQ ID No: 79)
(xiii) “FACL3” (SEQ ID No: 108)
(xiv) “FACL4” (SEQ ID No: 109)
(xv) “FLJ13977” (SEQ ID No: 81)
(xvi) “FLJ20342” (SEQ ID No: 56)
(xvii) “FLJ20481” (SEQ ID No: 82)
(xiii) “FLJ22390” (SEQ ID No: 84)
(xix) “ICAM-2” (SEQ ID No: 87)
(xx) “KIAA0095” (SEQ ID No: 110)
(xxi) “KIAA0922” (SEQ ID No: 111)
(xxii) “KIAA1181 (FRAGMENT)” (SEQ ID No: 88)
(xxiii) “KIAA1533 (FRAGMENT)” (SEQ ID No: 89)
(xxiv) “Mesenchymal stem cell protein DSCD75” (SEQ ID No: 91)
(xxv) “NICE-3” (SEQ ID No: 58)
(xxvi) “Neurotrypsin” (SEQ ID No: 92)
(xxvii) “Nicastrin” (SEQ ID No: 9)
(xxiii) “PAS domain containing serine/threonine kinase” (SEQ ID No: 112)
(xxix) “PP1, regulatory subunit 15B” (SEQ ID No: 93)
(xxx) “Pen-2” (SEQ ID No: 10)
(xxxi) “Presenilin-1” (SEQ ID No: 14)
(xxxii) “Presenilin-2” (SEQ ID No: 66)
(xxxiii) “Protein amplified in osteosarcoma (OS-9)” (SEQ ID No: 94)
(xxxiv) “Protein similar to stromal cell-derived factor 2” (SEQ ID No: 95)
(xxxv) “Protocadherin beta 8” (SEQ ID No: 96)
(xxxvi) “REP8 protein” (SEQ ID No: 97)
(xxxvii) “RING finger protein 5” (SEQ ID No: 98)
(xxxiii) “Retinal short-chain dehydrogenase/reductase retSDR2” (SEQ ID No: 99)
(xxxix) “Stromal cell-derived factor 2-like 1” (SEQ ID No: 100)
(xl) “Thioredoxin domain-containing protein” (SEQ ID No: 101)
(xli) “homolog of yeast golgi membrane protein yif1p (yip1p-interacting factor)” (SEQ ID No: 113), and
(xlii) “tyrosine phosphatase ensg00000149185” (SEQ ID No: 86), and wherein the one or more proteins of the Nicastrin (c) complex are selected from the group consisting of
(i) “APP-C99” (SEQ ID No: 120)
(ii) “Nicastrin” (SEQ ID No: 9)
(iii) “Psen1” (SEQ ID No: 3)
(iv) “aph-1a” (SEQ ID No: 1)
(v) “APP” (SEQ ID No: 23)
(vi) “CtnnA1” (SEQ ID No: 47)
(vii) “CtnnA2” (SEQ ID No: 48)
(viii) “CtnnB1” (SEQ ID No: 46)
(ix) “CtnnD1” (SEQ ID No: 49)
(x) “JUP” (SEQ ID No: 2)
(xi) “NCadh” (SEQ ID No: 50)
(xii) “ACAT1” (SEQ ID No: 4)
(xiii) “CGI-13” (SEQ ID No: 72)
(xiv) “CK2B” (SEQ ID No: 59)
(xv) “CLGN” (SEQ ID No: 54)
(xvi) “ECSIT” (SEQ ID No: 55)
(xvii) “FACL3” (SEQ ID No: 11)
(xiii) “FLJ20481” (SEQ ID No: 82)
(xix) “ITM2C” (SEQ ID No: 13)
(xx) “ITPR1” (SEQ ID No: 16)
(xxi) “KIAA0363” (SEQ ID No: 105)
(xxii) “MDR1” (SEQ ID No: 18)
(xxiii) “Neurotrypsin” (SEQ ID No: 19)
(xxiv) “PTP LOC114971” (SEQ ID No: 60)
(xxv) “RetSDR2” (SEQ ID No: 21)
(xxvi) “SFXN1” (SEQ ID No: 24)
(xxvii) “SPC18” (SEQ ID No: 26)
(xxiii) “SPC22” (SEQ ID No: 27)
(xxix) “SPC25” (SEQ ID No: 28)
(xxx) “SPTLC2” (SEQ ID No: 117)
(xxxi) “stearoyl-CoA desaturase” (SEQ ID No: 29)
(xxxii) “STT3” (SEQ ID No: 61)
(xxxiii) “TMP21” (SEQ ID No: 30)
(xxxiv) “UGCGL1” (SEQ ID No: 45)
(xxxv) “visinin-like 1” (SEQ ID No: 37)
(xxxvi) “Wolframin” (SEQ ID No: 67), and
(xxxvii) “YME1L1” (SEQ ID No: 32)
and wherein the one or more proteins of BACE1 (a) complex are selected from the group consisting of
(i) “CGI-13” (SEQ ID No: 72)
(ii) “Cadherin EGF LAG seven-pass G-type receptor 2” (SEQ ID No: 35)
(iii) “Calsyntenin 1” (SEQ ID No: 36)
(iv) “Delta-like homolog” (SEQ ID No: 118)
(v) “FLJ30668” (SEQ ID No: 69)
(vi) “PLJ39249” (SEQ ID No: 71)
(vii) “ITCH” (SEQ ID No: 73)
(viii) “KIAA1250” (SEQ ID No: 107)
(ix) “Nicastrin” (SEQ ID No: 9)
(x) “Nogo-A” (SEQ ID No: 77)
(xi) “PDGFRB” (SEQ ID No: 78)
(xii) “PTK7” (SEQ ID No: 80)
(xii) “SERPINA1” (SEQ ID No: 83)
(xiv) “SIM TO Y71H10A. 2. P” (SEQ ID No: 85)
(xv) “STX10” (SEQ ID No: 65)
(xvi) “Sortilin-related receptor” (SEQ ID No: 52)
(xvii) “Thioredoxin domain-containing protein” (SEQ ID No: 101)
(xviii) “integral membrane transporter protein” (SEQ ID No: 114)
(xix) “kinectin 1 (kinesin receptor)” (SEQ ID No: 90), and
(xx) “BACE1” (SEQ ID No: 38), and wherein the one or more proteins of the BACE1 (b) complex are selected from the group consisting of
(i) “APP” (SEQ ID No: 23)
(ii) “Nicastrin” (SEQ ID No: 9)
(iii) “ACAT1” (SEQ ID No: 4)
(iv) “APLP2” (SEQ ID No: 22)
(v) “BRI” (SEQ ID No: 5)
(vi) “calsyntenin 1” (SEQ ID No: 6)
(vii) “CELSR2” (SEQ ID No: 39)
(viii) “CGI-13” (SEQ ID No: 72)
(ix) “DLK1” (SEQ ID No: 7)
(x) “DSCD75” (SEQ ID No: 8)
(ii) “FADS2” (SEQ ID No: 40)
(xii) “GPR49” (SEQ ID No: 115)
(xiii) “ITM2C” (SEQ ID No: 13)
(xiv) “KiDins220” (SEQ ID No: 17)
(xv) “LAPTM4B” (SEQ ID No: 33)
(xvi) “Neurotrypsin” (SEQ ID No: 19)
(xvii) “NogoA” (SEQ ID No: 41)
(xviii) “OS-9” (SEQ ID No: 42)
(xix) “PDGFRB” (SEQ ID No: 43)
(xx) “PTK7” (SEQ ID No: 44)
(xxi) “RetSDR2” (SEQ ID No: 21)
(xxii) “S100alpha” (SEQ ID No: 34)
(xxiii) “SORL1” (SEQ ID No: 25)
(xxiv) “stearoyl-CoA desaturase” (SEQ ID No: 29)
(xxv) “TMP21” (SEQ ID No: 30)
(xxvi) “UGCGL1” (SEQ ID No: 45), and
(xxvii) “BACE1” (SEQ ID No: 38)
and wherein the one or more proteins of the Psen2-complex are selected from the group consisting of
(i) “aph-1a” (SEQ ID No: 1)
(ii) “Nicastrin” (SEQ ID No: 9)
(iii) “CGI-13” (SEQ ID No: 72)
(iv) “DSCD75” (SEQ ID No: 8)
(v) “ECSIT” (SEQ ID No: 55)
(vi) “FACL3” (SEQ ID No: 11)
(vii) “FADS2” (SEQ ID No: 40)
(viii) “FLJ10579” (SEQ ID No: 12)
(ix) “FLJ20481” (SEQ ID No: 82)
(x) “ITPR1” (SEQ ID No: 16)
(xi) “KIAA0090” (SEQ ID No: 57)
(xii) “MDR1” (SEQ ID No: 18)
(xiii) “NicAChRa3” (SEQ ID No: 62)
(xiv) “PLD3” (SEQ ID No: 20)
(xv) “SFXN1” (SEQ ID No: 24)
(xvi) “SLC4A2” (SEQ ID No: 63)
(xvii) “SORT1” (SEQ ID No: 15)
(xvii) “SPC18” (SEQ ID No: 26)
(xix) “SPC22” (SEQ ID No: 27)
(xx) “SPC25” (SEQ ID No: 28)
(xxi) “SPTLC2” (SEQ ID No: 117)
(xxii) “stearoyl-CoA desaturase” (SEQ ID No: 29)
(xxiii) “STT3” (SEQ ID No: 61)
(xxiv) “TMP21” (SEQ ID No: 30)
(xxv) “VLCAD” (SEQ ID No: 31)
(xxvi) “Wolframin” (SEQ ID No: 67)
(xxvii) “YME1L1” (SEQ ID No: 32), and
(xxvii) “Psen2” (SEQ ID No: 121)
and wherein the at least one protein of PTK7 complex is selected from the group consisting of
(i) “APP” (SEQ ID No: 23)
(ii) “BRI” (SEQ ID No: 5)
(iii) “CELSR2” (SEQ ID No: 39)
(iv) “DLK1” (SEQ ID No: 7)
(v) “FADS2” (SEQ ID No: 40)
(vi) “HIFPH3/EGLN3” (SEQ ID No: 64)
(vii) “ITM2C” (SEQ ID No: 13)
(viii) “Nap1-like” (SEQ ID No: 116)
(ix) “Reelin” (SEQ ID No: 51), and
(x) “PTK7” (SEQ ID No: 44).

14. The complex of claim 12, wherein one or more of the proteins are present in the form a fusion protein comprising said protein fused to an amino acid sequence different from that of the protein.

15. The complex of claim 14, wherein said amino acid sequence is an affinity tag or label.

16. A process for preparing and optionally analyzing the complex of claim 12 or of one or more components thereof comprising the following steps:
a). Expressing a protein of the complex, preferably a tagged protein, in a target cell,
b). isolating the protein complex which is attached to the protein, preferably a tagged protein, and
c). optionally disassociating the protein complex and isolating the individual complex members.

17. The process according to claim 16, wherein the tagged protein comprises two different tags which allow two separate affinity purification steps.

18. The process according to claim 17, wherein the two tags are separated by a cleavage site for a protease.

19. A nucleic acid construct containing one or more nucleic acids encoding proteins of the complex according to claim 12.

20. A host cell containing the nucleic acid construct according to claim 19.

21. A kit comprising, in one container, the complex of claim 12, optionally together with an antibody against the complex and/or further components such as reagents and working instructions.

22. The kit according to claim 21 for processing a substrate of the complex of claim 12.

23. The kit according to claim 21 for the diagnosis or prognosis of a disease or a disease risk, preferentially for a disease or disorder such as neurodegenerative disease such as Alzheimer's disease and related neurodegenerative disorders.

24. An array in which at least the complex according to claim 12 is attached to a solid carrier.

25. A process for processing a substrate of the complex of claim 12 comprising the step of bringing into contact the complex of claim 12 with said substrate such that said substrate is processed.

26. A pharmaceutical composition comprising the protein complex of claim 12.

27. The pharmaceutical composition according to claim 26 for the treatment of neurodegenerative disease such as Alzheimer's disease and related neurodegenerative disorders.

28. A method for screening for a molecule that binds to the complex of claim 12 comprising the following steps:
(a) exposing said complex, or a cell or organism containing said complex, to one or more candidate molecules; and
(b) determining whether said candidate molecule is bound to the complex.

29. A method for screening for a molecule that modulates directly or indirectly the function, activity, composition or formation of the complex of claim 12 comprising the steps of:
(a) exposing said complex, or a cell or organism containing said complex to one or more candidate molecules; and
(b) determining the amount of, activity of, protein components of, and/or intracellular localization of, said complex.

30. The method of claim 29, further comprising the step of determining whether said candidate molecule modulates gamma secretase and/or beta secretase activity.

31. The method of claim 29, wherein the amount of said complex is determined.

32. The method of claim 29, wherein the activity of said complex is determined.

33. The method of claim 29, wherein said determining step comprises isolating from the cell or organism said complex to produce said isolated complex and contacting said isolated complex in the presence or absence of a candidate molecule with a substrate of said complex and determining whether said substrate is processed in the absence of the candidate molecule and whether the processing of said substrate is modified in the presence of said candidate molecule.

34. The method of claim 33, wherein the substrate is APP and the cleavage of APP is analyzed.

35. The method of claim 29, wherein the amount of the individual protein components of said complex are determined.

36. (canceled)

37. The method of claim 29, wherein said method is a method of screening for a drug for treatment or prevention of neurodegenerative disease such as Alzheimer's disease.

38-40. (canceled)

41. A method for the production of a pharmaceutical composition comprising carrying out the method of claim 28 and further comprising mixing the identified molecule with a pharmaceutically acceptable carrier.

42. A method for diagnosing or screening for the presence of a disease or disorder or a predisposition for developing a disease or disorder in a subject, which disease or disorder is characterized by an aberrant amount of, component disposition of, or intracellular localization of the complex of claim 12, comprising determining the amount of, activity of, protein components of, and/or intracellular localization of, said complex.

43. The method of claim 42, wherein the activity of gamma secretase and/or beta secretase is determined.

44. The method of claim 42, wherein the amount of said complex is determined.

45. The method of claim 42, wherein the activity of said complex is determined.

46. The method of claim 42, wherein said determining step comprises isolating from the cell or organism said complex to produce said isolated complex and contacting said isolated complex in the presence or absence of a candidate molecule with a substrate of said complex and determining whether said substrate is processed in the absence of the candidate molecule and whether the processing of said substrate is modified in the presence of said candidate molecule.

47. The method of claim 42, wherein the amount of the individual protein components of said complex are determined.

48. (canceled)

49. The method of claim 42, wherein the disease or disorder is a neurodegenerative disease such as Alzheimer's disease and related neurodegenerative disorders.

50. A method for treating or preventing a disease or disorder characterized by an aberrant amount of, activity of, component composition of or intracellular localization of the complex of claim 12, comprising administering to a subject in need of such treatment or prevention a therapeutically effective amount of one or more molecules that modulate the amount of, activity or, or protein components of, said complex.

51. The method according to claim 50, wherein the modulating molecule is a FADS2 interacting molecule, preferably a FADS2-inhibitor.

52. (canceled)

53. The method according to claim 50, wherein said disease or disorder involves decreased levels of the amount or activity of said complex.

54. The method according to claim 50, wherein said disease or disorder involves increased levels of the amount or activity of said complex.

55. The complex of claim 12, where in the complex is a target for an active agent of a pharmaceutical, preferably a drug target in the treatment or prevention of a disease or disorder, preferentially of a disease or disorder such as neurodegenerative disease such as Alzheimer's disease and related neurodegenerative disorders.

56. (canceled)

57. A method for screening for a molecule that modulates directly or indirectly the function, activity, composition or formation of a protein complex comprising FADS2 and either one or more proteins of the Nicastrin (a) complex, of the Nicastrin (b) complex, of the Nicastrin (c) complex, of the BACE1-complex (a), of the BACE1-complex (b), of the Psen2-complex or of the PTK7 complex, wherein the method comprises the steps of:
(a) exposing said protein complex, or a cell or organism containing said protein complex to one or more candidate molecules; and
(b) determining the amount of, activity of, protein components of, and/or intracellular localization of said protein complex,
wherein said determining step comprises determining whether any of the proteins of the respective complex as defined in claim 13 is present in the complex.

58. A medicament for the treatment or prevention of a neurodegenerative disease such as Alzheimer's disease comprising a molecule that modulates the amount of, activity of, or the protein components of the complex of claim 12.

59. The medicament according to claim 58, wherein the modulating molecule is a FADS2 interacting molecule, preferably a FADS2 inhibitor.

60. The medicament according to claim 59, wherein the FADS2 inhibitor is selected from the group consisting of antibodies, antisense oligonucleotides, siRNA, low molecular weight molecules (LMWs), binding peptides, aptamers, and ribozymes.

61. The medicament according to claim 59, wherein the FADS2 is part of a protein complex comprising at least on one further protein selected from the proteins as listed in table 1, third column.

62. The medicament according to claim 59, wherein the FADS2 interacting molecule or inhibitor modulates the activity of gamma secretase and/or beta secretase.

63. A method for the production of a pharmaceutical composition comprising carrying out the method of claim 29 and further comprising mixing the identified molecule with a pharmaceutically acceptable carrier.

64. A method for diagnosing or screening for the presence of a disease or disorder or a predisposition for developing a disease or disorder in a subject, which disease or disorder is characterized by an aberrant amount of, component disposition of, or intracellular localization of a protein complex comprising FADS2 and either one or more proteins of the Nicastrin (a) complex, of the Nicastrin (b) complex, of the Nicastrin (c) complex, of the BACE1-complex (a), of the BACE1-complex (b), of the Psen2-complex or of the PTK7 complex comprising determining the amount of, activity of, protein components of, and/or intracellular localization of said protein complex, wherein said determining step comprises determining whether any of the proteins according to claim 13 is present in said protein complex.

65. The method according to claim 51, wherein the FADS2 inhibitor is selected from the group consisting of antibodies, antisense oligonucleotides, siRNA, low molecular weight molecules (LMWs), binding peptides, aptamers, and ribozymes.

66. The method according to claim 51, wherein the FADS2 is part of a protein complex comprising at least on one further protein selected from the proteins as listed in table 1, third column.

67. The method according to claim 51, wherein the FADS2 interacting molecule or inhibitor modulates the activity of gamma secretase and/or beta secretase.

68. The method according to claim 50, wherein the disease or disorder is a neurodegenerative disease such as Alzheimer's disease.
